(19) United States
(12) Patent Application Publication
(10) Pub. No.: US 2009/0081675 A1
(43) Pub. Date: Mar. 26, 2009

(54) METHODS, COMPOUNDS AND SYSTEMS FOR DETECTING A MICROORGANISM IN A SAMPLE

(76) Inventors: Bill W. COLSTON, JR., San Ramon, CA (US); J. Patrick Fitch, Middletown, MD (US); Shea N. Gardner, Oakland, CA (US); Peter L. Williams, San Anselmo, CA (US); Mark C. Wagner, Livermore, CA (US)

Correspondence Address: LLNL/Steinfl & Bruno;John H. Lee, Assistant Laboratory Counsel, Lawrence Livermore National Laboratory, L-703, P.O. Box 808, Livermore, CA, 94551, US

(21) Appl. No.: 12/196,238

(22) Filed: Aug. 21, 2008

Related U.S. Application Data
(60) Provisional application No. 60/966,047, filed on Aug. 24, 2007.

(51) Int. Cl. C12Q 1/68; C12M 1/00

(52) U.S. Cl. 435/6; 435/287.2

(57) ABSTRACT

Methods to identify a set of probe polynucleotides suitable for detecting a set of targets and in particular methods for identification of primers suitable for detection of target microorganisms related polynucleotides, set of polynucleotides and compositions, and related methods and systems for detection and/or identification of microorganisms in a sample.

### CROSS REFERENCE TO RELATED APPLICATIONS

[0001] This application claims priority to U.S. Provisional Application entitled “Method for Developing Unique Genetic Signatures for Viral Characterization” Ser. No. 60/966,047, filed on Aug. 24, 2007, Docket No. IL-11773, the disclosure of which is incorporated herein by reference in its entirety.

### STATEMENT OF GOVERNMENT GRANT

[0002] The United States Government has rights in this invention pursuant to Contract No. DE-AC52-07NA27344 between the U.S. Department of Energy and Lawrence Livermore National Security, LLC, for the operation of Lawrence Livermore National Security.

### TECHNICAL FIELD

[0003] The present disclosure relates to detection and/or identification of polynucleotides sequences and of targets associated thereto, especially microorganisms, and in particular of viruses and bacteria.

### BACKGROUND

[0004] High sensitivity detection of microorganisms and in particular of viruses has been a challenge in the field of biological molecule analysis, in particular when aimed at detection of a plurality of microorganisms. Whether for pathological examination or for fundamental biology studies, several methods are commonly used for the detection of various classes of microorganisms.

[0005] In particular, researchers employ numerous approaches for viral detection and discovery, including metagenomic sequencing [ref. 5], microarrays [ref. 9, 10, 12, 13, 18, 21, 24 and 25], or multiplex degenerate PCR followed by other methods of characterization such as mass spectrometry [ref. 4, 11, 22] or amplicon sequencing [ref. 8].

[0006] PCR is a rapid and cost effective technique suitable for the purpose. In some applications, however, PCR relies on specific primer sets, and it does not scale well for detection of many diverse targets, and in particular of many diverse microorganisms.

[0007] In case of viruses, high levels of diversity and lack of any universally conserved nucleotide or amino acid sequence regions makes it a challenge to detect well-characterized viruses and extremely difficult to discover novel viruses by methods that involve sequence-specific amplification. In contrast, bacteria contain universally conserved 16s rRNA sequences from which conserved primers may be designed, allowing amplification of rRNA coding regions from novel, unsequenced bacteria. [ref. 3, 26] Bacterial rRNA sequences vary sufficiently for discrimination to the family, genus, and sometimes even the species level.

[0008] As a consequence, primer design for detection and/or identification of known or unknown microorganisms, especially viruses, can be challenging. Nevertheless, PCR-based techniques for viral amplification and identification are common at the species or strain level. [ref. 6, 7, 19, 27]. These rely on careful primer design from the most conserved regions available, taking advantage of degenerate primers and/or replacement of variable positions with inosine bases, and the design and multiplex optimization of minimal sets of signatures which must be used in combination to ensure detection of all known variants.

[0009] However, multiplex primer design for many highly divergent targets is challenging, since usually no universally conserved primers exist to amplify fragments from all targets, and finding sets of primers likely to function well in multiplex, adds to the complexity of finding conserved primer candidates.

[0010] Furthermore, currently available multiplex/degenerate primer prediction tools require multiple sequence alignment [ref. 34, 36-38, 41]. Multiple sequence alignments are often difficult to construct for many sequences, exhausting either memory or available time, or both, before an alignment is completed. Moreover, even if an alignment does complete, for some divergent target sets such as RNA virus genomes of a single species or gene homologues across species, in some cases, alignments may be of suboptimal quality, or there is so little nucleotide sequence conservation that multiple primers, possibly with degenerate positions, are required to amplify all targets.

[0011] In particular, for many organisms there are few or no conserved regions of sufficient size across all strains of a species for a pair of traditional-length primers (at least 18 bases), particularly in important single-stranded RNA viruses including influenza A, HIV1, ebola, and foot and mouth disease viruses. PCR-based specific (non-random) amplification across all viral families using typical 18+ base primers would require many thousands of PCR primers to span known viral sequence diversity.

[0012] Additionally, with PCR-based specific amplification approaches, which require specific primers for each species or strain, discovery or detection of unanticipated species is usually unlikely.

### SUMMARY

[0013] Provided herein, are probe polynucleotides, and in particular primers, that are suitable for detecting a plurality of microorganisms and/or identifying unknown microorganisms and related compositions, methods and systems.

[0014] In particular, according to a first aspect, a method to identify a set of probe polynucleotides, in particular primers, suitable for detecting a set of targets, in particular, target microorganisms is disclosed. The method comprises: identifying the set of target microorganisms; and identifying a set of rules to be satisfied by target sequences. The method further comprises: identifying a set of target polynucleotides by selecting one or more target polynucleotides, so that each target polynucleotide is comprised in at least one microorganism of the target microorganisms, and each target polynucleotide comprises a target sequence satisfying to the set of rules. The method also comprises: identifying the set of probe polynucleotides by reverse complementing one or more of the target sequences of the target polynucleotides of the identified set of target polynucleotides.

[0015] According to a second aspect, a method for identification of primers suitable for detection of targets and in particular target microorganisms is disclosed. The method comprises the steps of: i) identifying a first set of candidate oligonucleotides present in at least one of the target microorganisms; ii) sorting the candidate oligonucleotides of the first set by number of target microorganisms in which they occur, and iii) identifying second and third sets of candidate oligonucleotides, said second and third sets comprising oligonucleotides lying within a distance range of the oligonucleotides of the first set of candidate oligonucleotides, the second set comprising oligonucleotides lying upstream of the first set, and the third set comprising oligonucleotides lying downstream of the first set. The method also comprises: iv) sorting the candidate oligonucleotides of the second and third sets by number of target microorganisms in which they occur; and v) selecting a most frequently occurring oligonucleotide from the first set as one primer and a most frequently occurring oligonucleotide from the second and third sets as another primer. The method still further comprises: vi) if the other primer is selected from the second set, including a reverse complement of the one primer and the other primer in a set of selected primers; otherwise, if the other primer is selected from the third set, including the one primer and a reverse complement of the other primer in the set of selected primers. The method also comprises: vii) updating a list of target microorganisms to be detected by eliminating from the list target microorganisms having valid amplicons generated by any combination of primers in the set of selected primers; and viii) repeating steps ii) through vii) until a detectable amplicon has been generated by all target microorganisms to be detected.

[0016] According to a third aspect, a method for identification of primers suitable for detection of targets and, in particular, target microorganisms is disclosed. The method comprises the steps of: i) identifying a first set of candidate oligonucleotides present in at least one of the target microorganisms; ii) sorting the candidate oligonucleotides of the first set by number of target microorganisms in which they occur; and iii) selecting a most frequently occurring oligonucleotide as one primer. The method further comprises: iii) for all target microorganisms containing the one primer, identifying a second set of candidate oligonucleotides within an upstream or downstream distance range of the one primer; iv) sorting the candidate oligonucleotides of the second set by number of target microorganisms in which they occur; and v) selecting a most frequently occurring oligonucleotide from the sorted candidate oligonucleotides of the second set as another primer. The method also comprises: vi) if the other primer is downstream of the one primer, including the one primer and a reverse complement of the other primer in a set of selected primers; otherwise, if the other primer is upstream of the one primer, including a reverse complement of the one primer and the other primer in the set of selected primers. The method still further comprises: vii) updating a list of target microorganisms to be detected by eliminating from the list target microorganisms having valid amplicons generated by any combination of primers in the set of selected primers; and viii) repeating steps ii) through vii) until a detectable amplicon has been generated by all target microorganisms to be detected.

[0017] According to a fourth aspect, a method for identification of primers suitable for detection of target microorganisms. The method comprises the steps of: i) identifying a set of candidate oligonucleotides present in at least one of the target microorganisms; ii) sorting pairs of the candidate oligonucleotides of the set by number of target microorganisms in which they occur within a predetermined distance from each other; iii) selecting the most frequently occurring pair as a pair of primers; and iv) including the pair of primers in a set of selected primer pairs. The method also comprises: v) updating a list of target microorganisms to be detected by eliminating from the list target microorganisms having valid amplicons generated by any pair in the set of selected primer pairs; and vi) repeating steps ii) through v) until a detectable amplicon has been generated by all target microorganisms to be detected.

[0018] According to a fifth aspect, set of probe polynucleotides, and in particular a set of primers, is disclosed. The polynucleotides are identifiable by the methods herein disclosed.

[0019] According to a sixth aspect, a composition comprising a set of probe polynucleotides, and more particularly a set of primers, of the present disclosure is disclosed, wherein the polynucleotides are comprised in the composition together with and a suitable carrier, vehicle and/or auxiliary agent.

[0020] According to a seventh aspect, a method to detect a set of target microorganisms in a sample is disclosed. The method comprises: identifying the set of target microorganisms, each target microorganism of the set of target microorganisms comprising a target polynucleotide; and identifying a set of probe polynucleotides, in particular primers, suitable for identification of the set of target microorganisms with one of the methods herein disclosed. The method further comprises: contacting the identified set of probe polynucleotides with the sample for a time and under condition to allow formation of a probe polynucleotide-target-polynucleotide complex, thus providing a set of probe-polynucleotide-target-polynucleotide complexes; detecting the set of probe polynucleotide target polynucleotide complexes; and comparing the set of detected probe-polynucleotide-target-polynucleotide complexes with a predetermined set of probe-polynucleotide-target polynucleotide complexes, each predetermined probe-polynucleotide-target polynucleotide complex of the predetermined set of probe-polynucleotide-target polynucleotide complexes associated with a target microorganism of the set of target microorganisms.

[0021] According to an eighth aspect, a method to identify an unknown microorganism to be included in a set of microorganisms is disclosed. The method comprises: identifying the set of target microorganisms, each target microorganism of the set of target microorganisms comprising a target polynucleotide; and identifying a set of probe polynucleotides, in particular primers, suitable for the identification of the set of target microorganisms with one of the methods herein disclosed. The method further comprises: contacting the identified set of probe polynucleotides with the sample for a time and under condition to allow formation of probe-polynucleotide-target polynucleotide complex, thus providing a set of probe-polynucleotide-target polynucleotide complexes; and detecting the set of a probe-polynucleotide-target-polynucleotide complexes. The method also comprises comparing the set of detected a probe-polynucleotide-target polynucleotide complexes with a set of predetermined probe-polynucleotide-target polynucleotide complexes, each predetermined probe-polynucleotide-target polynucleotide complex of the predetermined set of probe-polynucleotide-target polynucleotide complexes associated with a target microorganism of the set of target microorganisms; and identifying a detected probe-polynucleotide-target polynucleotide complex that cannot be associated with any predetermined probe-polynucleotide-target polynucleotide complex of the set of probe-polynucleotide-target polynucleotide complexes, the identified detected probe-polynucleotide-target polynucleotide complex associated with the unknown microorganism.

[0022] According to a ninth aspect, a system for detecting a set of targets and in particular target microorganisms, in a sample and/or for identifying unknown microorganisms to be included in a set of microorganisms is disclosed. The system comprises: a set of probe polynucleotide, in particular primers herein disclosed; and a reagent for providing and/or detecting a complex of said probe polynucleotides with target polynucleotides of said targets.

[0023] The probe polynucleotides, compositions, methods and systems herein disclosed allow multiplex detection of a set of microorganisms comprising highly divergent target microorganisms. In particular, the primers, compositions, methods and systems herein disclosed, can be used to detect a set of microorganism including some divergent target microorganisms such as RNA virus genomes of a single species or gene homologues across species, as well as target microorganisms with little nucleotide sequence conservation.

[0024] The probe polynucleotides, compositions, methods and systems herein disclosed further allow detection of a set of microorganisms comprising a large and possibly diverse group of microorganisms, using a near-minimal multiplex-compatible set of primers capable of amplifying target sequences in any microorganism of the set of microorganisms at issue (universal primers). In particular, methods and systems herein disclosed allow predicting primer sets for all available complete genomes or segments for every viral family, as well as separate primer sets for several highly diverse species of RNA viruses.

[0025] The probe polynucleotides, compositions, methods and systems herein disclosed allow a strategy of detection by PCR amplification with universal primers followed by limited sequencing, fragment length measurement, base composition, or other amplicon-characterizing method, of just a few amplicons per organism which can be used for a fast, cheap, and advantageous for high throughput viral surveillance and discovery.

[0026] The probe polynucleotides, compositions, methods and systems herein disclosed, allow use of primers selected to satisfy requirements imposed by the experimental design of choice, such as avoidance of primer-dimers or homodimers formation, isothermal Tₘ's to improve efficiency of multiplex detection, and allowable GC % range.

[0027] The probe polynucleotides, compositions, methods and systems herein disclosed allow detection of a set of microorganisms including a high number of diverse microorganisms with approaches that do not require multiple sequence alignment to be performed.

[0028] The probe polynucleotides, compositions, methods and systems herein disclosed can be used in biowarfare detection applications, in particular for identifying, detecting, and monitoring bio-threat agents that contain nucleic acid signatures, such as spores, bacteria, viruses etc.

[0029] The probe polynucleotides, compositions, methods and systems herein disclosed can also be used in biomedical applications, in particular for (a) tracking, identifying, and monitoring outbreaks of infectious disease including emerging, previously unidentified and genetically engineered pathogens; and/or (b) automated processing, amplification, and detection of host or microbial and viral DNA or RNA in biological fluids for medical purposes.

[0030] The probe polynucleotides, compositions, methods and systems herein disclosed can further be used in forensic applications, in particular for automated processing, amplification, and detection of DNA in biological fluids for forensic purposes.

[0031] The probe polynucleotides, compositions, methods and systems herein disclosed can also be used for verification of food and beverage safety and in particular for (a) automated food testing for bacterial or viral contamination; and/or (b) high throughput genetic screening for drug discovery and novel therapeutics

[0032] The details of one or more embodiments of the disclosure are set forth in the accompanying drawings and the description below. Other features, objects, and advantages will be apparent from the description and drawings, and from the claims.

### BRIEF DESCRIPTION OF THE DRAWINGS

[0033] The accompanying drawings, which are incorporated into and constitute a part of this specification, illustrate one or more embodiments of the present disclosure and, together with the detailed description, serve to explain the principles and implementations of the disclosure.

[0034] FIGS. 1 to 3 show a first exemplary algorithm to identify probe polynucleotides according to an embodiment herein disclosed.

[0035] FIGS. 4 to 6 show a second exemplary algorithm to identify probe polynucleotides according to an embodiment herein disclosed.

[0036] FIG. 7 shows a third exemplary algorithm to identify probe polynucleotides according to an embodiment herein disclosed.

[0037] FIG. 8 shows an example of output files from find_amplicons.pl, which compares a list of multiplexed primers to a file of sequences.

[0038] FIG. 9 shows a diagram plotting the number of primers required to amplify fragments from each complete genome or segment in a viral family versus the number of available sequences in that family. Primer numbers were for 10-mers, Tₘ between 35-50° C., binned in groups of 20 primers/bin.

[0039] FIG. 10 shows a diagram plotting the percentage of genomes amplified versus the number of primers required, for primers of either 10-mers or 17-18-mers, for virus species HIV-1, FMDV, and Norwalk, according to an embodiment herein disclosed.

[0040] FIG. 11 shows a diagram plotting the percentage of genomes amplified versus the number of primers required, for primers of either 10-mers or 17-18-mers, for virus species Influenza A HA and NA segments, according to an embodiment herein disclosed.

[0041] FIG. 12 shows a diagram plotting the percent of viral genomes detected vs. number of primers required, for primers of different sizes based on all available viral genomes, using sequence data as of Apr. 25, 2007.

[0042] FIG. 13 shows a diagram plotting the number of primers in the universal set for all viruses, as a function of primer size, based on sequence data available April 2007 and imposing Tₘ constraints in primer selection, without Tₘ or GC % constraints, and based on January 2004 sequence data with Tₘ constraints. For primer size of 5 with Tₘ constraints, a constraint of Tₘ>0 was used, delivering primers with GC % of 80-100%.

[0043] FIG. 14 shows a diagram plotting the fraction of viral genomes available on Apr. 25, 2007 that would have been detected using primer sets developed based on the sequence data available on Jan. 1, 2004.

[0044] FIG. 15 shows a block diagram illustrating the maximum number of bands and mean number of bands per genome in a bin as a function of primer size, predicted using the universal primer sets for all viral genomes and segments as indicated in FIG. 12.

[0045] FIG. 16 shows a block diagram illustrating the percent of newly emerged (“unknown” viruses) that would have been detected based on sequence data available as of Jan. 1, 2004 or Apr. 25, 2007, as a function of primer length.

[0046] FIG. 17 shows a block diagram illustrating the fraction blast hits in target and non-target families for amplicons generated using specific amplification with the universal 10-mer primers for a selection of newly emerged viruses.

[0047] FIG. 18 shows a block diagram illustrating the average number blast hits in target and non-target families for amplicons generated using specific amplification with the universal 10-mer primers for a selection of newly emerged viruses.

[0048] FIG. 19 shows a block diagram illustrating fragments of the lengths indicated, randomly chosen from the genomes of 9 newly emerged virus species and BLASTed against other viruses in the same (target) family or viruses in other (non-target) families are plotted against the fraction of fragments (queries) with BLAST hits.

[0049] FIG. 20 shows a block diagram illustrating fragments of the lengths indicated, randomly chosen from the genomes of 9 newly emerged virus species and BLASTed against other viruses in the same (target) family or viruses in other (non-target) families are plotted against the average number of BLAST hits per fragment (+/− standard errors).

[0050] FIG. 21 shows a diagram illustrating the probability that at least one fragment has BLAST hits to the correct target family, calculated as indicated in the text.

[0051] FIG. 22 shows a diagram illustrating the probability that at least one fragment has BLAST hits to the correct family and no fragments have BLAST hits to the incorrect family, calculated as indicated in the text.

[0052] FIG. 23 shows a diagram illustrating viral discovery according to an embodiment herein disclosed performed by amplifying with a single pentamer followed by sequencing the products.

[0053] FIG. 24 shows a diagram illustrating viral discovery according to an embodiment herein disclosed performed by amplifying with a single hexamer, followed by sequencing the products.

[0054] FIG. 25 shows a block diagram illustrating detection/identification of microorganisms using 6-mer to 11-mer primers.

[0055] FIG. 26 shows a block diagram illustrating detection/identification of microorganisms using 10-15mers and 10mers primers.

[0056] The present specification also contains appendices A to E, each of which makes part of the present specification and is incorporated by reference in its entirety.

### DETAILED DESCRIPTION

[0057] Primers, compositions, methods and systems are herein disclosed that can be used for detection and/or identification of targets, and in particular microorganisms, in a sample.

[0058] The term “probe” as used herein indicates a hybridization probe, i.e. a polynucleotide of variable length, which is used to detect another polynucleotide (herein also target polynucleotide) having a nucleotide sequence that is complementary to the sequence in the probe. The probe thereby hybridizes to single-stranded nucleic acid (DNA or RNA) whose base sequence allows probe-target base pairing due to complementarity between the probe and target. Exemplary probe polynucleotides are primers suitable for amplification of target polynucleotides.

[0059] The term “polynucleotide” or “nucleic acid” as used herein indicates an organic polymer composed of two or more monomers including nucleotides, nucleosides or analogs thereof. The term “nucleotide” refers to any of several compounds that consist of a ribose or deoxyribose sugar joined to a purine or pyrimidine base and to a phosphate group and that is the basic structural units of nucleic acids. The term “nucleoside” refers to a compound (as guanosine or adenosine) that consists of a purine or pyrimidine base combined with deoxyribose or ribose and is found especially in nucleic acids. The term “nucleotide analog” or “nucleoside analog” refers respectively to a nucleotide or nucleoside in which one or more individual atoms have been replaced with a different atom or a different functional group. Accordingly, the term “polynucleotide” includes nucleic acids of any length and DNA or RNA analogs and fragments thereof. A short polynucleotide, typically with 60 or fewer nucleotides is also called a nucleotidic oligomer or oligonucleotide, although there is no strict length criteria for defining an oligonucleotide, and strands up to 200 nucleotides can be called oligonucleotides. Probe polynucleotides may be synthesized via phosphoramidite technology or generated and labeled by PCR amplification or cloning (older methods). In order to increase the in vivo stability of the probe RNA is not used, instead RNA analogues may be used, in particular morpholino.

[0060] The term “primer” as used herein indicates a strand of nucleic acid that serves as a starting point for replication of a polynucleotide (herein also template polynucleotide). In particular, a primer is able to hybridize a template strand of the template polynucleotide and allow a polymerase to form on the template strand, an elongating strand that is complementary to said template strand. In several applications, primers are usually 6-36 nucleotides long, most often in the range of 18-30 nucleotides, although it is conceivable to have shorter or longer primers. A primer may be introduced in a reaction mixture as a single strand polynucleotide or a double strand polynucleotide and/or as a precursor polynucleotide that can be then converted into the primer by enzymatic reactions or other reactions identifiable by a skilled person upon reading of the present disclosure.

[0061] The term “hybridization” as used herein refers to the process of combining complementary, single-stranded nucleic acids into a single molecule, and in particular an at least partially double stranded polynucleotide wherein bases of each strand are bound to bases of the other strand through hydrogen bonding.

[0062] The term “detect” or “detection” as used herein indicates the determination of the existence, presence or fact of a target or signal in a limited portion of space, including but not limited to a sample, a reaction mixture, a molecular complex and a substrate. A detection is “quantitative” when it refers, relates to, or involves the measurement of quantity or amount of the target or signal (also referred as quantitation), which includes but is not limited to any analysis designed to determine the amounts or proportions of the target or signal. A detection is “qualitative” when it refers, relates to, or involves identification of a quality or kind of the target or signal in terms of relative abundance to another target or signal, which is not quantified.

[0063] The term “identification” as used herein indicates the process of assigning a new or pre-existing individual name or class name to an individual target or a group of targets, such as compounds or microorganisms. Identification of compounds or microorganisms with individual names (or codes) is usually based on individualistic features uniquely associated with the compound or microorganism. In particular, identification of groups of targets (and in particular of set of targets) is usually based on one or more features uniquely associated with the targets of that group of targets.

[0064] The term “target” as used herein indicates an analyte of interest. The term “analyte” refers to a substance, compound or component whose presence or absence in a sample has to be detected. Analytes include but are not limited to microorganisms, polynucleotides and related sequences.

[0065] The term “microorganism” as used herein refers to an organism of microscopic or ultramicroscopic size such as a prokaryotic or a eukaryotic microbial species or a virus. The term “prokaryotic” refers to a microbial species which contains no nucleus or other organelles in the cell, which includes but is not limited to Bacteria and Archaea. The term “eukaryotic” refers to a microbial species that contains a nucleus and other cell organelles in the cell, which includes but is not limited to Eukarya such as yeast and filamentous fungi, protozoa, algae, or higher Protista.

[0066] The term “bacteria” as used herein refers to prokaryotic microbial species which include but are not limited to Gram-positive and Gram-negative bacteria, Proteobacteria, Cyanobacteria, Spirochetes and related species, Planctomyces, Bacteroides, Flavobacteria, Chlamydia, Green sulfur bacteria, Green non-sulfur bacteria including anaerobic phototrophs, Radioresistant micrococci and related species, Thermotoga and Thermosipho thermophiles.

[0067] The term “virus” refers to a sub-microscopic infectious agent that is unable to grow or reproduce outside a host cell. Each viral particle, or virion, consists of genetic material, (polynucleotides such as DNA or RNA), within a protective protein coat called a capsid. The capsid shape varies from simple helical and icosahedral (polyhedral or near-spherical) forms, to more complex structures with tails or an envelope. Viruses infect all cellular life forms and are grouped into animal, plant and bacterial types, according to the type of host infected. Examples of viruses associated with human diseases include but are not limited to influenza, Ebola, AIDS, avian influenza and SARS.

[0068] The term “sample” as used herein indicates a limited quantity of something that is indicative of a larger quantity of that something, including but not limited to fluids from a biological environment, specimen, cultures, tissues, commercial recombinant proteins, synthetic compounds or portions thereof.

[0069] In several embodiments, the methods comprise identifying a set of microorganisms to be detected. The wording “set of” as used herein with reference to microorganisms, primers, polynucleotides or other analytes indicate a group including one or more of said analytes. Accordingly, identification of the set of microorganisms to be detected can be performed by assigning a new or pre-existing name to a group of microorganisms that share one or more features uniquely associated with the microorganisms of the group of microorganisms that forms the set to be detected.

[0070] In several embodiments, the methods herein disclosed comprise identifying a set of rules to be satisfied by target sequences. The rules of the set of rules can in particular be directed to control base pairing between probe polynucleotide and target polynucleotide and the specificity of related hybridization reactions. The wording “specific” “specifically” or “specificity” as used herein with reference to the binding of a molecule to another, such as polynucleotide hybridization, refers to the recognition, contact and formation of a stable complex between the molecule and the another, together with substantially less to no recognition, contact and formation of a stable complex between each of the molecule and the another with other molecules. The term “specific” as used herein with reference to a molecular component of a complex (e.g. a nucleic acid strand of a double stranded polynucleotide), refers to the unique association of that component to the specific complex which the component is part of. In some embodiments, the set of rules is identified to maximize the specificity of the hybridization between probe nucleotides and target polynucleotides.

[0071] The target polynucleotides can then be selected by selecting one or more polynucleotides that is comprised in at least one microorganism of the identified set of target microorganisms, and that comprises a target sequence satisfying to the set of rules.

[0072] In some embodiments, probe polynucleotides, and in particular primers, that are suitable for detecting and/or identifying any microorganisms of a set of target microorganisms (herein also universal primer) are identified by reverse complementing the one or more target polynucleotides of the identified set of target polynucleotides.

[0073] The wording “reverse complement” as used herein indicates the negative sense, minus strand or complement of a double stranded polynucleotide, that (a) can hybridize to the positive sense, or plus strand of the same double stranded polynucleotide, and (b) is provided in the 5′ to the 3′ direction. The word “complement” indicates that the sequence is such that where there is an A in the plus strand, there is a T in the complement, and where there is a C in the plus strand, there is a G in the complement, and vice versa. The word “reverse” indicates that the minus or complement strand is given in the 5′ to 3′ direction, so that its sequence is the reverse of the complement to the plus strand.

[0074] In some embodiments, an experimental design of choice is selected in view of the set of rules to be satisfied by target sequences to further control the specificity of polynucleotide hybridization. In particular, in some of those embodiments, the experimental design is selected to maximize the specificity of said hybridization.

[0075] In some embodiments, the probe polynucleotides are primers and the set of target polynucleotides comprises two or more target polynucleotides.

[0076] In some embodiments, identifying a set of target polynucleotides can be performed by identifying a first target polynucleotide and a second target polynucleotide in at least one microorganism of the set of target microorganisms. In particular, the second target comprises a target sequence that satisfies to a rule requiring that the detection of the microorganism is performed by the combined use of the second target polynucleotide and the first target polynucleotide (e.g. as primers in a PCR or other amplification reactions). In some of those embodiments the set of probe polynucleotides is formed by primers and includes a pair of primers identified by complementing target sequences of the first target polynucleotide or the second target polynucleotide.

[0077] In some of those embodiments, at least one of the first and the second target polynucleotides can be further identified in one or more additional target microorganisms different from the initial target microorganism. One or more additional target polynucleotides that comprise one or more additional target sequences can then be identified in the additional target microorganisms. In particular the additional target sequences of the additional target polynucleotide satisfy to a rule that requires that the detection of the additional target microorganisms is performed by the combined use of the additional target polynucleotides and at least one of the first target polynucleotide and the second target polynucleotide. In some of those embodiments, the set of primers includes a first pair of primers identified by complementing target sequences of the first target polynucleotide or the second target polynucleotide and a second pair of primers identified by complementing target sequences of at least one of the first target polynucleotide and the second target polynucleotide and target sequences of the one or more additional target polynucleotides.

[0078] In other embodiments at least a first additional target polynucleotide and a second additional target polynucleotide can be further identified in at least a second additional target microorganism of the set of target microorganisms. The first and second additional target polynucleotide are selected to satisfy a rule requiring that detection of the second additional target microorganism is performed by the second additional target polynucleotide in combination with the at least first additional target polynucleotide. In some of those embodiments, the set of primers includes a first pair of primers identified by complementing target sequences of the first target polynucleotide or the second target polynucleotide and an at least second additional pair of primers identified by complementing target sequences of the first additional target polynucleotide and the second additional target polynucleotide

[0079] In some embodiments, the identification of suitable primers to detect and/or identify target microorganisms can be performed according to the following steps.

[0080] In a first step, a set of acceptable primer candidates is identified. In some embodiments, the first step is performed by reverse complementing a set of target polynucleotides that a) are common to microorganisms of the set of microorganisms to be detected and that b) satisfy the rules of the identified set of rules, as illustrated in the exemplary procedure of Example 6, later discussed.

[0081] In particular, in some embodiments, as illustrated in the exemplary procedure of Example 1, later discussed, once certain rules/specifications of experimental design of choice (e.g. desired length, Tm, lack of homopolymer strings etc) are predetermined (e.g. to allow an effective multiplexed detection), a set of polynucleotides that satisfy the predetermined specifications (or parameters) and are common to all or part of the microorganisms of the set of microorganisms to be detected, can be selected. In some embodiments, identification of conserved primers that are also target specific can also be performed, for example with the procedure exemplified in Example 2, later discussed.

[0082] In other embodiments, illustrated in the exemplary procedure of Example 3, later discussed, common polynucleotides that occur in all or part of the microorganisms of interests are first identified, the specifications of choice can then be set and the common oligonucleotide matching the desired specification selected.

[0083] In all of those embodiments, the target polynucleotides to be used in the identification of the primers herein described are usually identified on the basis of the set of target microorganisms to be detected/identified as illustrated in the exemplary procedures of Examples 4 and 7, later discussed.

[0084] In a second step, a set of primer pair is defined on the basis of the acceptable primer candidates identified by the first step. In particular, the set of primer pairs is selected to include primer pairs that allow amplification of target polynucleotides in any microorganisms of the set of microorganisms, as illustrated in the exemplary procedure of Example 6, later discussed.

[0085] In some embodiments, the selection of the primer pair is performed by selecting a first primer pair that amplifies at least one target polynucleotide selected according to the first step. Further primer pairs can then be identified by selecting primer pairs that amplify target polynucleotides which are not amplified by other primer pairs until target polynucleotides from all microorganisms of the set of microorganisms to be detected can be amplified. In particular, the primers of each pair can be identified by identifying a first candidate primer and a second candidate primer located upstream or downstream the first candidate primer in target polynucleotides of two or more of the microorganisms to be detected at a distance that allow amplification according to the amplification technique of choice. In some embodiments, all primers of the selected primer pairs are also compared against all targets to be detected by allowing any combination of primers so that primer pairs can be optimized to minimize the number of primers necessary to obtain at least one detectable amplicon from every one of the targets.

[0086] The terms “amplify” and “amplification”, as used herein with reference to target polynucleotides, indicate a procedure for isolating and exponentially amplifying (e.g. through replication of) a fragment or sequence of a polynucleotide. Exemplary procedures that can be used to amplify a polynucleotide and in particular a target polynucleotide include but are not limited to Polymerase Chain Reaction (PCR), Rolling circle amplification (RCA), Ramification extension amplifying method (RAM), Helicase-dependent amplification (HAD), Abscription (Abortive Transcription), Cycling Probe Technology, Ligase Chain Reaction, Linked Linear Amplification, Looped-Mediated Isothermal Amplification (LAMP), Single Primer Isothermal Amplification (SPIA), Split Promoter Amplification Reaction (SPAR), Strand Displacement Amplification (SDA), and Multiplex Ligation Probe Assay (MLPA).

[0087] The term “amplicon” as used herein indicates pieces of a polynucleotide formed as the products of an amplification event. For example, amplicons can be formed via polymerase chain reactions (PCR), ligase chain reactions (LCR) and other procedures for amplifying a polynucleotide identifiable by the skilled persons upon reading of the present disclosure.

[0088] Exemplary procedures to perform the identification of primer pairs are illustrated in FIGS. 1 to 3, FIGS. 4 to 6 and FIG. 7 and further exemplified in Examples 1, 3 and 6. Degenerate bases may be included in primer sequences, allowing sequence variation in the target sequences recognized, or hybridized, by the primer. These procedures can be implemented by software and executed by a processor on a computer.

[0089] In some embodiments, the method to identify primers herein described can be used for identifying primers particularly suitable to perform multiplexed detection of target microorganisms. In those embodiments the method is also indicated as Multiplex Primer Prediction (MPP) method or software algorithm. The MPP can be used to build multiplex compatible primer sets for large, diverse sets of target sequences.

[0090] In some embodiments, the primer identification method herein disclosed, and in particular the MPP, can be used to identify primers suitable to detect and/or identify microorganisms (such as viruses) with high levels of intraspecies sequence variation, which often slip past PCR-based detection if the sequences of some isolates do not contain a match to the specific primers used.

[0091] In some embodiments, the MPP can be used to design multiplex primer sets for amplifying homologues in a gene family. In those embodiments, input sequences to MPP could be provided by gene sequences and optionally a small region up- and down-stream of the gene to consider for primer selection, rather than whole genomes as Applicants have demonstrated in the procedures illustrated in the Examples section. A user can specify an appropriate amplicon length range to ensure amplification of an adequate span across the gene.

[0092] In some embodiments, the primer identification method and in particular the MPP could also be used to design multiplex primer sets for unrelated target sequences, for example, multiple bacterial and viral species or gene families, in a single reaction. Since no sequence alignment is required, there is no need for any sequence conservation among targets. Combined with a downstream method to identify the amplicons produced, such as hybridization, fragment lengths, or sequencing, MPP is the only available tool to do de novo design of multiplex compatible primer sets to amplify unrelated target sequences in a single PCR.

[0093] In various embodiments, the primer identification method and in particular MPP allows design of a large number of diverse primers in a highly scalable (see in particular Example 11, later described), automated fashion (see Example 5, later described) that does not require multiple sequence alignment (see Example 5). In particular, the MPP can be used to design universal primer sets to amplify all available genomes from predetermined sets of microorganisms such as viral families, as well as to generate primer sets for several diverse species such as foot-and-mouth disease virus, influenza, Norwalk virus, and HIV-1. More particularly, in some embodiments, an MPP algorithm is based on conserved k-mer subsequences, requiring no multiple sequence alignments, where multiplex-compatible primer sets are built up de novo as illustrated in the procedures described in the Examples section. In some embodiments, the code may be run from a web interface after uploading an input fasta file of target sequences and selecting parameter values like primer length and Tₘ and amplicon length ranges, or the source code may be downloaded and run locally.

[0094] In some embodiments, exemplified by the procedure illustrated in Example 5 over 25 thousand Orthomyxoviridae sequences were used as input in one run, as well as all Poxviridae sequences, many of them ˜200 Kb long. In other embodiments, exemplified by the procedure illustrated in Example 6, later described, runs can be performed using all available viral genomes from all families simultaneously as the input. For many target sets, such as those including all the genomes of a species, predicting a universal primer set usually requires only minutes. With extremely large, highly diverse target sequence sets such as all Orthomyxoviridae sequences, a primer prediction run may take days. Memory requirements can be reduced for example by representing oligonucleotide sequences as bit vectors, with each nucleotide coded as a bit instead of a byte, by using suffix arrays to track all candidate oligonucleotides and their frequencies in the targets, and/or by ranking the primer candidates by frequency. For the top ranked primer candidates, the code can use again suffix arrays or suffix trees to determine oligonucleotide locations in each target sequence. The code can also allow degenerate primers or primers with a limited (user specified) number of mismatches to targets (e.g. using hamming or edit distance options for suffix array calculations).

[0095] The sets of probe polynucleotide, and in particular primers, identifiable with the identification method herein described include but are not limited to universal primer sets for all viruses, for each viral family, as well as for several species and serotypes, including influenza, HIV-1, foot-and-mouth disease, and Norwalk viruses and other viruses such as the ones indicated in Example 5, later described, and universal primers for gene families, or other target sets for which sequence data is available.

[0096] The number of primers in a universal set depends on the Tₘ and primer length requirements, as well as the number and diversity of target sequences. In particular, in some embodiments, MPP, in contrast to some prior art techniques, generates non-degenerate primer sets predicted to work in multiplex, to avoid primer dimers, and it does not require any sequence alignment or labor-intensive manual steps to downselect from among multiple candidates or design primers to detect outlying targets.

[0097] In some embodiments, sets of primers for detecting and/or identifying viral family include almost 2000 10-mer primers, or ˜3700 18-mer primers, as shown in the exemplary procedure of Example 6, later described. Relaxing melting temperature constraints, allowing isothermal primer length variation, or including all primers in a single, highly multiplexed reaction rather than as a series of smaller multiplexes reduces the number of primers required for universal amplification by 20-80%, although these changes would impose greater empirical demands for successful multiplexing.

[0098] In some embodiments, universal primer sets consisting of about 7 to about 30 base pair nucleic acid strands can be used to amplify sequences of target viral DNA/RNA as illustrated in the procedure exemplified in Examples 5 and 6. These primer sets can be designed to amplify specific nucleic acid sequences of all viral complete genomes sequenced to date, as well primer sets designed separately for various subgroupings of the viruses, including for each of the viral families (currently 70 virus families with available full genome or full segment sequence data). In embodiments wherein the primer size is fixed at 10 bases (10-mer), between 2 and <700 primers are required in family-level universal sets. The number of primers in a family's set increases with the number of available genomes for that family, as well as the diversity of the family. Sequences for representative sets of these primers are given in Appendix A incorporated herein by reference in its entirety. Examples of primer sets have been provided for each viral family, generated with parameters as indicated in Example 5.

[0099] Accordingly, in some embodiments the set of probe polynucleotides can include the sets illustrated in Appendix A (which makes part of the presented specification and is incorporated herein by reference in its entirety), a combination thereof or variants thereof. More particularly, set of primers herein disclosed can comprise a polynucleotide having a sequence selected from the group consisting of SEQ ID NO: 1 to SEQ ID NO: 11,333 or a degenerate sequence thereof, wherein the term “degenerate” is used to identify sequences that have at least one degenerate position, i.e. a position which has an ambiguity of one or more bases, with respect to the original sequence while maintaining the ability to hybridize (under the same or other reaction conditions) the same target sequences of the original sequence. More particularly, set of primers can be used for detection of viral families and/or specific viruses as indicated in the Examples and in Appendix A, wherein various combinations of polynucleotides from the same or different sets indicated in the Examples or in Appendix for a certain microorganism or group of microorganism are included in the scope of the present disclosure.

[0100] Other primer sets are possible, and can be generated using the code provided in Appendix E, modifying the parameters as desired by the user.

[0101] In some embodiments, a probe polynucleotide set identified with the primer identification method herein described can be included in a composition together with a suitable carrier, vehicle or auxiliary agent.

[0102] The polynucleotides identified with the identification methods herein described and or the related compositions can be used in a method to detect microorganism of a set of microorganisms in a sample wherein the identified set of polynucleotides is contacted with the sample for a time and under conditions to allow formation of a probe polynucleotide-target polynucleotide complex which can be formed by amplicons in case of amplification of target polynucleotides of the set of target microorganisms with primers. The set of probe-target complexes (and in particular of target amplicons) thus provided can be detected and compared with a predetermined set of probe polynucleotide-target polynucleotide complexes, associated with a target microorganism of the set of target microorganisms.

[0103] In some embodiments, the probe polynucleotide identified with the identification methods herein disclosed can be used to identify new and previously unknown microorganism. In those embodiments, the unknown microorganism is identified by identifying at least one probe polynucleotide-target polynucleotide complex that cannot be associated with any predetermined probe-polynucleotide-target polynucleotide complexes of the predetermined set of probe polynucleotide-target polynucleotide complexes. In particular, in those embodiments the identified probe polynucleotide-target polynucleotide complex is associated with the unknown microorganism.

[0104] In some of those embodiments, the probe polynucleotides are primers. In particular, previously unknown microorganisms of the set of microorganisms are identified using a primer with a length of less than 11 bases (see simulation procedure exemplified in Example 10, later described).

[0105] More particularly, some embodiments are based on the observation that short primers are more likely to be conserved among both known, sequenced microorganisms and unknown or unsequenced microorganisms. Amplicons generated using short primers that do not match amplicons predicted based on known, sequenced microorganisms, indicate that an unknown organism is present (see Example 10). The novel amplicons can be further characterized, such as by amplicon sequencing and comparison to existing sequence databases. Amplicons can also be exploited to further characterize the unknown, for example by designing primers based on the novel amplicon, and using them to amplify or sequence additional regions from the sample containing the novel organism.

[0106] In some embodiments, the method to detect/identify a set of microorganisms is performed by contacting the set of identified probe polynucleotides (and in particular primer pairs) with the sample in a single reaction vessel, (see Example 5, specifically the examples indicated as “no Bins”). In particular, all probes (and in particular primers) for a given target set of sequences are intended to be mixed in a single multiplex reaction for creating an amplicon from any one of those target sequences (see Example 5). The probes going into the multiplex reaction can be computationally selected to avoid probe dimers.

[0107] In other embodiments, the method to detect/identify a set of microorganisms is performed by subdividing an initial sample in several (even millions or billions) of discrete sub-samples to allow analysis of every individual microorganism in the set in parallel as illustrated in the exemplary procedure of Example 14 wherein the probes are primers. In particular, in view of reaction kinetics and thermodynamics created by multiplexing an enormous number of primers in order to simultaneously amplify a huge number of different targets, in some embodiments, the sample can be divided into bins based on the set of microorganisms of interest (e.g. a viral family of interest), or alternatively based on the multiplex compatibility of the primers involved (the approach used in the procedure of Example 6.

[0108] In those embodiments, each subsample would only contain a smaller set of probes, limiting the complexity of the hybridization and detection reactions. In some of those embodiments the hybridization is also performed using small primers (e.g. of length 5-11 nucleotides), which are likely to hybridize any target (including unknowns), versus using larger oligos with more specificity. Use of smaller probes, and in particular smaller primers, requires a more limited multiplex compared to other embodiments, since shorter probes are more likely to be conserved among more target sequences, meaning that in the exemplary case in which probes are primer, fewer primers in total should be required to generate amplicons from every target. However, short primers may also reduce the amplicon resolution since for some microorganisms the primers in a set may amplify dozens to thousands of amplicons, making it difficult to differentiate or further characterize each fragment when it is part of a more complex mixture of sequences (see Examples 8, 13 and 14).

[0109] In some embodiments, hybridization and detection (e.g. through amplification and sequencing) of a few, randomly chosen fragments can be performed. In particular, Applicants performed simulations to determine how the length and number such fragments affect the ability to classify that virus as to its correct family, and found that sequencing a few 100-mer fragments is likely to provide correct family identification, and is likely to provide more information than sequencing a single fragment that is ten times longer (see Examples 9, 10, and 12). A possible explanation that is not intended to be limiting of the scope of the disclosure is that in some of those embodiments the 100-mer regions could be more dispersed across the genome of the target than a single, longer region, and this may increase the probability of including a region that is characteristic of the appropriate family. However, in some of those embodiments a sophisticated empirical strategy might need to be employed to separate out one or a few amplicons for sequencing per genome, since one would not have a specific sequencing primer if fragments are selected randomly. One could imagine that pyrosequencing [ref 15] methods might be adaptable to such a strategy, with modification so as to rapidly amplify only a few, randomly selected fragments from each of many samples rather than more deeply sequencing a single sample. Cost and speed might be the advantages of sequencing a limited number of fragments rather than more deeply sequencing many oligonucleotide fragments from a sample, so long as a sufficient number are sequences so as to characterize the organism(s) in the sample to the desired level.

[0110] In other embodiments, a specific amplification (directed to amplify specific predetermined fragments, as opposed to random amplification directed to amply randomly chosen fragments) can be performed e.g. by using short primers of 5-11 nucleotides. In those embodiments, in view of the short length of the primers, it is essential to purify the sample, excluding as much contaminating nucleic acids from eukaryotic and prokaryotic sources as possible, since simulations indicate that sets of short multiplex primers will generate hundreds or thousands of amplicons from a human or typical bacterial genome, overwhelming any viral signal. Alternatively, longer primers can be used, including but not limited to lengths of 17-30 nucleotides, and these can be designed so as to have more specificity to the targets, which should allow less thorough sample purification to eliminate eukaryotic DNA/RNA prior to amplification.

[0111] In the methods to detect/identify microorganisms herein disclosed the detected complexes are compared to predetermined complexes associated to microorganisms of the set of microorganisms to identify the microorganism associated to the detected complex. In particular, in embodiments wherein the probes are formed by primers, following amplification of the target polynucleotides, the related amplicons can be detected and then compared with predetermined amplicons associated with known microorganisms to detect the microorganism associated with the amplicon or identify a previously unknown microorganism.

[0112] Detection of the probe polynucleotide-target polynucleotide complexes can be performed with techniques identifiable by a skilled person, which can vary in view of the specific probe polynucleotide used in the probe polynucleotide-target polynucleotide complexes. In particular, detection of a probe polynucleotide-target polynucleotide complex can be performed through labels or labeled molecules.

[0113] The terms “label” and “labeled” as used herein refers to a probe, primer or other molecule that is capable of being detected. Labels include but are not limited to radioactive isotopes, fluorophores, chemiluminescent dyes, chromophores, enzymes, enzymes substrates, enzyme cofactors, enzyme inhibitors, dyes, metal ions, nanoparticles, metal sols, ligands (such as biotin, avidin, streptavidin or haptens) and the like. The term “fluorophore” refers to a substance or a portion thereof which is capable of exhibiting fluorescence in a detectable image. As a consequence the wording and “labeling signal” as used herein indicates the signal emitted from the label that allows detection of the label, including but not limited to radioactivity, fluorescence, chemoluminescence, production of a compound in outcome of an enzymatic reaction and the likes.

[0114] For example, in some embodiment, detection of a probe polynucleotide-target polynucleotide complex can be performed by labeled probes that can be detected with methods known or identifiable by a skilled person such as Southern blotting RNAase protection or the likes. For example, to detect hybridization of the probe to its target sequence, the probe can be tagged (or labelled) with a molecular marker; commonly used markers are ³²P (a radioactive isotope of phosphorus incorporated into the phosphodiester bond in the probe DNA) or Digoxigenin, which is non-radioactive antibody-based marker. DNA sequences or RNA transcripts that have moderate to high sequence similarity to the probe are then detected by visualizing the hybridized probe via autoradiography or other imaging techniques. Detection of sequences with moderate or high similarity depends on how stringent the hybridization conditions were applied—high stringency, such as high hybridization temperature and low salt in hybridization buffers, permits only hybridization between nucleic acid sequences that are highly similar and therefore detection of specific complexes, whereas low stringency, such as lower temperature and high salt, allows hybridization when the sequences that are less similar. Hybridization probes used in DNA microarrays refer to DNA covalently attached to an inert surface, such as coated glass slides or gene chips, and to which a mobile cDNA target is hybridized. When the probe polynucleotide is a primer, detection can be performed by detecting products of replication of a target polynucleotide and in particular amplicons.

[0115] In other embodiments, wherein the probes are primers, the detection of the amplicon is performed by detecting the lengths of the resulting amplicon fragments determined through a technique such as separation using gradient electrophoresis. In those embodiments, the microorganisms detection is based on the unique electrophoretic banding signature created by the amplification of individual fragments from a given species or strain of virus. Examples of some fragment length distributions detectable using gradient electrophoresis are given in Appendices B-D each of which makes part of the present specification. Additional procedures suitable to detect amplicons and/or perform viral characterization include but are not limited to techniques such as mass spectrometry to estimate base composition (like that used by IBIS T5000) [ref. 4, 22], electrophoretic determination of fragment size distributions, fragment sequence, microarray or other (e.g. Luminex beads, nano bar codes, etc.) hybridization patterns.

[0116] An exemplary procedure suitable to detect amplicons for various sets of microorganisms (and in particular viruses) is illustrated in Example 14, later discussed.

[0117] Systems for detection and/or identification of target microorganisms are also disclosed. The systems include a set of probes, and in particular primers, herein disclosed alone or in combination with reagents suitable to perform the detection according to the methods herein disclosed.

[0118] The systems herein disclosed can be provided in the form of kits of parts. In particular in a kit of parts, one or more primers (in particular, a set of primers) and possibly also other reagents can be comprised in the kit independently possibly included in a composition together with suitable vehicle carrier or auxiliary agents. For example a polynucleotide can be included in one or more compositions alone and/or included in a suitable vector. Also, the primers of the set of primers can be included in a composition alone or together with other primers of the same set. Furthermore, the primers can be included in various forms or compositions that are suitable for use in amplifying target polynucleotides of interest or to detect the polynucleotide of interest with other techniques that do not require amplification of the target. For example, in some embodiments, a labeled primer can be included in the kit to allow detection using techniques identifiable by the skilled person and that vary in view of the label used.

[0119] In some embodiments, a labeling molecule can also be included in the kit herein disclosed, that allows detection of the amplicons or the polynucleotide of interest and include but are not limited to labeled polynucleotides, labeled antibodies, other labels identifiable by the skilled person upon reading of the present disclosure.

[0120] Additional components can also be included and comprise system reference standards, and additional components identifiable by a skilled person upon reading of the present disclosure.

[0121] In the kit of parts herein disclosed, the components of the kit can be provided, with suitable instructions and other necessary reagents, in order to perform the methods here disclosed. In some embodiments, the kit can contain the compositions in separate containers. Instructions, for example written or audio instructions, on paper or electronic support such as tapes or CD-ROMs, for carrying out the assay, can also be included in the kit. The kit can also contain, depending on the particular method used, other packaged reagents and materials (i.e. wash buffers and the like).

[0122] Further details concerning the identification of the suitable carrier agent or auxiliary agent of the compositions, and generally manufacturing and packaging of the kit, can be identified by the person skilled in the art upon reading of the present disclosure.

### EXAMPLES

[0123] The methods and system herein disclosed are further illustrated in the following examples, which are provided by way of illustration and are not intended to be limiting.

### Example 1

### Algorithm for Calculating Highly Conserved, Multiplexed Primer Sets

[0124] To select highly conserved universal primers for a set of targets, Applicants have coded the following algorithm in PERL, provided as Appendix E. The universal set of primers should produce at least one amplicon in each of the target sequences. The process is as follows:

[0125] 1) First, one identifies all candidate oligos occurring in the target set of sequences that fall in the desired length and Tₘ ranges (Table 1), do not contain homopolymer strings longer than 4 bases, do not contain non-ATCG bases, and are not composed entirely of dinucleotide repeats. Tₘ's and free energies (see below) are calculated using Unafold. [ref. 39] Alternative values of any of the parameters in Table 1 may be desired, and can be specified by the user. Alternatively, candidate oligos can be selected based on GC % and length, rather than Tₘ. Alternative methods of calculating Tₘ and free energies may be used. All parameter settings are provided as examples, and are not exclusive.

TABLE 1

| Parameter | Value |
|---|---|
| Minimum Tₘ | 35° C. * (10-mer) or 55° C. (17-18-mer) |
| Maximum Tₘ | 50° C. (10-mer) or 70° C. (17-18-mer) |
| x_{homodimer} | −7 kcal/mol |
| x_{dimer} | −7 kcal/mol |
| xₕₐᵢᵣ | −5 kcal/mol |
| d₁ | 80 |
| d₂ | 620 |

* Throughout, Tₘ and ΔG are calculated using Unafold with [Na⁺] = 0.2 M, [Mg⁺²] = 0.0015 M, Tₐₙₙₑₐₗ = 30° C., strand concentration of each strand of 1e−07 M, and with the “DNA” option. Alternative settings may be employed, as specified by the user.

[0126] These candidate oligos are stored in a hash h₁ with the oligo sequences as keys (stored as strings, or in another embodiment, stored as bit vectors) and values containing bit vectors composed of the following: the number of genomes containing that oligo, the identity of the last target sequence added to the count (to speed the initial hash construction), and the identities of each target sequence containing that oligo. Target sequences are referenced by number in a lookup table. This representation stores the oligo frequencies efficiently for subsequent calculations, but does not track the location of each oligo in each sequence, to reduce memory requirements. Currently, oligo sequences in the keys are represented as character strings (8 bits/character), although in a future version this will be replaced with storage of A, C, T, and G using only 2 bits each, providing a four-fold memory savings.

[0127] 2) Second, the oligos are sorted by the frequency of target sequences in which they occur. A set s₁ of the 100 most frequent oligos whose homodimer and hairpin free energies exceed x_{homodimer} and xₕₐᵢᵣ, respectively, is constructed. Since free energy calculation is relatively time consuming, these are only calculated as needed until the set s₁ has been populated with 100 oligos (this number is a tunable parameter that can be set by the user).

[0128] 3) Next, two more hashes are constructed like the first for each oligo i in s₁, using only the subsequences from the original targets that lie within distance range d₁-d₂ of that oligo s₁ᵢ. One is a hash h₂ᵤ for the upstream oligos, and the other is a hash h_{2d} for the downstream oligos. After sorting both h₂ᵤ and h_{2d} by frequency in the target sequences, the oligo j is chosen for each oligo i that occurs most frequently either upstream or downstream, giving the most frequent oligo pairs (i,j). Again, only oligos j with homodimer and hairpin free energies exceeding x_{homodimer} and xₕₐᵢᵣ and (i,j) dimer free energy exceeding x_{dimer} are allowed, so if the most frequent j is not energetically acceptable, the next most frequent j is selected until an acceptable oligo can be found. The most frequent pair (i*,j*) is selected from among all (i,j) pairs. If j* is from h₂ᵤ, then it becomes primer p₁ and the reverse complement of i* becomes primer p₂, while if j* is from h_{2d} then the reverse complement of j* and i* are used as primers. These primers are added to the reaction bin.

[0129] 4) Then the list of target sequences yet to be detected is updated, eliminating any with valid amplicons in the specified size range generated by any combination of primers already selected. The values of hash h₁ are also updated by subtracting from the oligo frequency counts those targets detected and removing their target identities.

[0130] 5) The process from steps 2-4 is repeated for the targets not yet detected until all targets have a valid amplicon, adding the constraint at the end of step 3 that primers p₁ and p₂ must have dimer free energies exceeding x_{dimer} with any primer already selected, in order to be added to the bin. If either primer in the pair is predicted to dimerize with any primer already selected in that bin, then the next most frequent pair (i*,j*) is checked for acceptability as primers, until a suitable pair is found. In step 4, since primers in a bin are intended to be mixed in multiplex, targets can be detected by any combination of primers in any orientation relative to one another, not just those that were selected as a pair. Applicants call these unintended detections “serendipitous hits”, and update the list of yet-to-be-detected targets and h₁ accordingly.

[0131] 6) If the option to bin primers in subsets of b primers is selected, primers are added to a bin until that bin contains a maximum of b primers, at which point a new bin is begun. Occasionally, the same primer may be selected more than once in the same bin, paired with a different oligo, resulting in an odd number of primers. Binning primers in small groups avoids exclusion of the most highly conserved oligos because of primer dimer free energy constraints. It also results in fewer amplicons on average per genome, since each reaction bin contains fewer primers than would a larger multiplex of unbinned primers.

[0132] In the software release, Applicants also include a script, find_amplicons.pl, to predict all the amplicons that should be generated by a list of (multiplexed) primers mixed with any fasta file of sequences (FIG. 8). For each sequence, all amplicon sequences, their length and position, and the forward+reverse primer combination to yield that product (or if appropriate an indication that no amplicons are predicted) are printed to an output file. The amplicon sequences facilitate downstream analysis, such as probe design or fragment length or sequence comparisons among the amplified sequences. The script also produces a summary file of the fragment length distributions, or expected banding patterns, and a list of the sequence headers predicted to display each pattern.

[0133] An embodiment of the present disclosure on which Example 1 is based is shown in the flowchart of FIGS. 1 to 3, which show steps S1-S12 for performing a method to identify primers suitable for detecting target microorganisms.

### Example 2

### Identification of Conserved and Target Specific Primers

[0134] The code described in Example 1 focuses on finding conserved primers, and does not require that the primers be family- or species-specific. Thus, organisms outside the target sequence set could also generate amplicons. To ensure that a member of the target group is present using the primers generated using the methods described above requires analysis of the amplicons produced (for example, sequence, base composition, or length). However, if specific as well as conserved primers are required, the simplest approach would be to input a set of target sequences in which all k-mers (where k is the primer length) present in any non-target organism have been replaced by “N”'s.

[0135] These non-unique oligos will not be considered as primer candidates, and can be found using, for example, BLAST [ref. 29] or suffix array software such as vmatch (http://www.vmatch.de/). This approach, however, does risk being overly strict by eliminating some potentially successful candidate primers: it takes two primers in proximity to generate an amplicon, so 1) a single non-unique primer, 2) a pair of primers too far apart to actually generate an amplicon in a non-target sequence, or 3) nearby candidate oligos that partially overlap a non-unique stretch of N's might actually work to uniquely amplify members of the target set. Applicants are currently formulating a modified algorithm to address the third of these issues, which after hashing candidate oligonucleotides as described in Example 1 step 1, those oligonucleotides are checked against a nucleotide sequence database of non-target sequences using suffix array software such as vmatch, and candidate oligonucleotides that are not unique to the target sequences (with a user-selected level of 0 or more mismatches or indels by hamming or edit distance) are eliminated from further consideration as candidate primers by eliminating them from the hash h1. In the current version of the MPP of Example 1, all primers sets described in the analyses performed here are conserved, but they were not checked for uniqueness.

### Example 3

### Algorithm for Calculating Highly Conserved, Multiplexed Primer Sets Meeting Required Specification

[0136] Primer sets were identified according to the following process.

[0137] 1) List all acceptable primer candidates: First, all oligos that occur in any of the sequences in the target set are found, where the target set is a set of viral genomes, either all viral genomes or the genomes in a particular family. Only those matching the desired specifications proceed. These specifications can be any or all of the following: length, Tm, and GC % within specified ranges, no homopolymer strings of more than 4 bases (e.g. primers with AAAAA (SEQ ID 11,334) not allowed), and no primers that are composed entirely of a dinucleotide repeat. Applicants have developed code that predicts conserved universal primers that may vary in length but that have isothermal melting temperatures to improve their compatibility in multiplex reactions. Tm's are predicted using our streamlined version of the most accurate software currently available: Unafold®, based on nearest neighbor thermodynamics. As part of a Tech Based Award through the Computations directorate, Applicants improved the speed of Unafold so that it can predict the Tm's of over 100 million oligonucleotides in just hours, making it feasible for predictions for even the largest viral families. In addition, Applicants have implemented a new addition to the algorithm to further aid the prediction of multiplexed primer sets by avoiding primer dimers, homodimers, and hairpins, which compete with the desired reactions of primer-target binding. These undesired reactions can also be predicted using the thermodynamic models in the Unafold software, although these computations are slower, so they are performed later as described below. The location of each primer in each of the target genomes is recorded, even if a given oligo occurs multiple times. Forward versus reverse complements of oligos are also tracked, since it will be important whether a primer will amplify in the forward or reverse direction. The strand that is given as the plus strand in Genbank is arbitrary for double-stranded genomes. To make this memory-intensive process feasible, data is stored as bits rather than bytes, in an efficient hash lookup table. This lookup table contains sequence and positional information of each candidate primer in each of the target genomes. Applicants also have an option in the code to tie the hash to disk, if memory is still limiting. Although that requires longer run times, it does allow larger numbers or longer sets of target genomes to be analyzed, although running the analyses subdivided by viral family does not require tying the hash file to disk.

[0138] 2) Select the first primer pair: Oligos are sorted by the frequency of presence/absence in the target genomes, and the primer candidate p1 present in the most genomes is selected. The hairpin and homodimer free energy is calculated, and if the oligo passes the user's specifications, then that oligo continues for consideration as p1. If not, it is excluded from further consideration and the next most conserved oligo is selected as p1. Then, for all genomes that contain p1, all oligos within an allowable distance range d upstream (5′) of the highest frequency oligo are again sorted by frequency of presence/absence in that same subset of genomes within distance d of p1. This process is repeated for oligos within an allowable distance range d downstream (3′) of p1. The oligo p2 that is either upstream or downstream that occurs in the most genomes is selected as a pair with p1, and it is checked for free energies of formation of hairpins, homodimers, and primer dimers with p1. If these free energies are not acceptable, the next most frequent oligo is selected as p2, and so on, until one can be selected that forms neither hairpins nor primer dimers. Oligos that are the reverse complement of one that has already been selected are not permitted, so as to avoid obvious primer dimer formation. If the downstream oligo is chosen, then p1 and the reverse complement of p2 are added to the universal primer set. If instead the upstream oligo is chosen, then the reverse complement of p1 and the existing p2 (not reverse complemented) are added to the universal primer set. Thus, the two primers added should work in a pair as a forward and reverse primer to amplify detectable fragments in the maximum number of target genomes. The distance d is determined by the technology used to detect the bands, e.g. for capillary electrophoresis, bands up to 1500 bp can be discriminated.

[0139] 3) Determine as-yet-unamplified genomes and find next set of primers. Those genomes that yield a detectable (in the appropriate length range) band from the first two primers are stored in a “detected” pool, and all the oligos in the remaining genomes are re-sorted by the number of as-yet-undetected genomes in which they occur. The oligo p3 occurring in the most genomes is checked for hairpins and dimers, and if acceptable it is selected, and again as in step 2 all oligos within a distance d upstream or downstream of p3 are ranked by frequency and the one with the highest frequency is chosen as p4, as in step 2 determining which oligo should be reverse complemented to serve as a reverse primer of the pair. In selecting all oligos to add to the set of primers, no primers that are predicted to form hairpins or primer dimers (homodimers or dimers with other primers already in the set) are allowed. The primer p4 may be the same as one previously chosen (p1, p2, or p3), in which case the universal primer set increases by only one instead of two primers.

[0140] 4) All the primers chosen thus far are compared against all of the targets, allowing any combination of primers as the forward or reverse of a pair, and those genomes in which a detectable band appears are stored in the detected pool. The steps 3-4 are repeated on the as-yet-undetected targets until sufficient primers are chosen such that at least one detectable amplicon is generated from every one of the targets.

[0141] In view of the number of viral sequence data used to create these primer sets the huge predicted viral diversity on earth, the rapid evolution of RNA and phage viruses, and the lack of cultureable viruses to characterize, it is expected, therefore, that these signatures will evolve following the process defined above at regular intervals. Despite these challenges, Applicants have computationally demonstrated the ability of this initial primer set to identify newly emerging viruses such as Ebola, SARS, Nipah, and Hendra viruses. The electrophoretic banding signatures would be identified as “unknown”, or outside the existing banding library for sequenced viruses. These bands could easily be extracted and sequenced for comparison against existing genome libraries. This would create an ever-expanding library of biological viral signatures (based on fragment size) that could be used to rapidly characterize unknown samples.

[0142] An embodiment of the present disclosure on which Example 2 is based is shown in the flowchart of FIGS. 4 to 6, which show steps T1-T16 for performing a method to identify primers suitable for detecting target microorganisms.

### Example 4

### Target Sets Used in Calculations of Conserved Primer Sets

[0143] Target sets used in this example are the set of all viral complete genomes and complete segments for each viral family, downloaded from publicly available sequence databases (Genbank, Baylor, TIGR) as of Oct. 29, 2007. Partial genomes were not included. Applicants' goal was to generate highly conserved family-level primer sets. There were genome sequences available for 70 of the 72 families, except for Metaviridae and Roniviridae. Draft sequences with multiple contigs were merged into a single sequence entry, with contigs separated by 1000 N's, a stretch sufficiently long (greater than d₂ in all but one of our runs) so that primer pairs would not be designed to fall on different contigs, although there were very few draft sequences in contigs where this was necessary. Calculations were performed on a single AMD Opteron 2.4 GHz processor with 16 or 32 GB of RAM. Run parameters are given in Table 1 of Example 1. For family-level primers, Applicants computed primer sets with primers of length 10, for binned primers in groups of b=20 primers per bin. Applicants also computed primers sets assuming unbinned primers (all primers in the set mixed in a single reaction) and removing all Tₘ constraints.

[0144] Next, Applicants computed primers of length 17-18-mers in unbinned reactions with the Tₘ's and other parameters as specified in Table 1 (see Example 1). Finally, Applicants designed primers of 17-20 bases in groups of 30 primers per bin, primer Tₘ=55-65° C., and with amplicon length (d₁ and d₂) 100-2000 bp.

[0145] Applicants also generated primer sets for several species with high sequence diversity: HIV-1, foot-and-mouth-disease virus (FMDV), Norwalk virus, and Influenza A segments HA and NA. To illustrate the challenges of designing primers from an alignment, Applicants aligned these organisms using MUSCLE [ref. 33] when possible. For the HIV-1 and Influenza A segments HA and NA sequences, MUSCLE ran out of memory before completing. An alternative alignment tool, Clustalw [ref. 31], had completed only a small fraction of the alignment after running for days. So for these large data sets, a random selection of ˜35 sequences for each target was aligned with MUSCLE, and this alignment was used to build an HMM (hmmbuild) using HMMer (http://hmmer.wustl.edu/). [ref. 32] The full sequence set was then aligned to the HMM using hmmalign. For Norwalk virus and FMDV, Applicants designed multiplex-degenerate primer sets using Greene SCPrimer [ref. 36] and HYDEN [ref. 38].

### Example 5

### Primer Sets Suitable for Viral Genome Identification

[0146] The number of family-level primers for each family, and the number of genomes available for generating those primer sets, is given in Table 2, for 4 alternative parameter settings.

TABLE 2

| | | Single (s) | | Tm 35-50, 10-mers, | No bins, No Tm or | Tm 55-70, primer | Tm 55-65, primer |
|---|---|---|---|---|---|---|---|
| | | or double | Number of | 20 primers/bin, | GC % constraints, | length 17-18, no | length 17-20, Bin |
| | DNA or | (d) | Genomes or | Amplicon | 10-mers, Amplicon | bins, Amplicon | size = 30, Amplicon |
| Family | RNA | stranded | Segments | length 80-620 | length 80-620 | length 80-620 | length 100-2000 |
| Metaviridae | RNA | S | 0 | 0 | 0 | 0 | 0 |
| Roniviridae | RNA | s | 0 | 0 | 0 | 0 | 0 |
| Barnaviridae | RNA | s | 1 | 2 | 2 | 2 | 2 |
| Bicaudaviridae | DNA | d | 1 | 2 | 2 | 2 | 2 |
| Corticoviridae | DNA | d | 1 | 2 | 2 | 2 | 2 |
| Marnaviridae | RNA | s | 1 | 2 | 2 | 2 | 2 |
| Plasmaviridae | DNA | d | 1 | 2 | 2 | 2 | 2 |
| Globuloviridae | DNA | d | 2 | 2 | 2 | 4 | 4 |
| Lipothrixviridae | DNA | d | 2 | 4 | 2 | 4 | 4 |
| Nimaviridae | DNA | d | 3 | 2 | 2 | 2 | 2 |
| Rudiviridae | DNA | d | 4 | 4 | 2 | 4 | 4 |
| Ascoviridae | DNA | d | 5 | 4 | 2 | 4 | 4 |
| Fuselloviridae | DNA | d | 5 | 4 | 4 | 6 | 6 |
| Hypoviridae | RNA | d | 6 | 4 | 4 | 6 | 6 |
| Phycodnaviridae | DNA | d | 6 | 6 | 4 | 6 | 6 |
| Tetraviridae | RNA | s | 6 | 8 | 8 | 12 | 12 |
| Asfarviridae | DNA | d | 8 | 2 | 2 | 2 | 2 |
| Chrysoviridae | RNA | d | 8 | 10 | 6 | 15 | 16 |
| Narnaviridae | RNA | s | 8 | 12 | 8 | 16 | 16 |
| Sequiviridae | RNA | s | 8 | 6 | 6 | 8 | 6 |
| Iridoviridae | DNA | d | 9 | 8 | 4 | 14 | 14 |
| Tectiviridae | DNA | d | 10 | 2 | 2 | 4 | 4 |
| Bornaviridae | RNA | s | 11 | 2 | 2 | 2 | 2 |
| Leviviridae | RNA | s | 11 | 8 | 8 | 13 | 14 |
| Birnaviridae | RNA | d | 12 | 12 | 10 | 16 | 16 |
| Cystoviridae | RNA | d | 12 | 14 | 12 | 24 | 22 |
| Astroviridae | RNA | s | 13 | 6 | 6 | 12 | 12 |
| Tymoviridae | RNA | s | 16 | 10 | 8 | 22 | 20 |
| Nodaviridae | RNA | s | 18 | 20 | 16 | 22 | 22 |
| Dicistroviridae | RNA | s | 19 | 20 | 12 | 24 | 24 |
| Inoviridae | DNA | s | 28 | 22 | 14 | 32 | 32 |
| Totiviridae | RNA | d | 29 | 28 | 24 | 46 | 46 |
| Filoviridae | RNA | s | 35 | 6 | 4 | 5 | 6 |
| Comoviridae | RNA | s | 36 | 34 | 22 | 48 | 48 |
| Nanoviridae | DNA | s | 36 | 28 | 17 | 37 | 40 |
| Partitiviridae | RNA | d | 36 | 42 | 35 | 60 | 58 |
| Closteroviridae | RNA | s | 37 | 32 | 20 | 46 | 48 |
| Baculoviridae | DNA | d | 41 | 16 | 10 | 38 | 33 |
| Caulimoviridae | DNA | d | 46 | 32 | 18 | 48 | 48 |
| Arteriviridae | RNA | s | 49 | 6 | 6 | 12 | 12 |
| Luteoviridae | RNA | s | 49 | 10 | 8 | 18 | 20 |
| Podoviridae | DNA | d | 60 | 34 | 30 | 66 | 66 |
| Rhabdoviridae | RNA | s | 60 | 24 | 18 | 40 | 40 |
| Tombusviridae | RNA | s | 61 | 31 | 24 | 60 | 54 |
| Myoviridae | DNA | d | 62 | 36 | 29 | 78 | 66 |
| Hepeviridae | RNA | s | 65 | 4 | 4 | 8 | 8 |
| Parvoviridae | DNA | s | 68 | 34 | 26 | 56 | 54 |
| Adenoviridae | DNA | d | 71 | 20 | 14 | 32 | 30 |
| Herpesviridae | DNA | d | 79 | 22 | 20 | 58 | 48 |
| Bromoviridae | RNA | s | 80 | 55 | 44 | 108 | 91 |
| Caliciviridae | RNA | s | 80 | 26 | 20 | 50 | 44 |
| Flexiviridae | RNA | s | 100 | 59 | 42 | 125 | 98 |
| Papillomaviridae | DNA | d | 100 | 44 | 21 | 103 | 97 |
| Arenaviridae | RNA | s | 103 | 38 | 21 | 93 | 80 |
| Microviridae | DNA | s | 105 | 10 | 6 | 14 | 12 |
| Togaviridae | RNA | s | 105 | 20 | 10 | 32 | 31 |
| Poxviridae | DNA | d | 133 | 16 | 6 | 22 | 20 |
| Paramyxoviridae | RNA | s | 159 | 36 | 26 | 60 | 56 |
| Siphoviridae | DNA | d | 162 | 69 | 45 | 145 | 130 |
| Potyviridae | RNA | s | 196 | 41 | 26 | 119 | 106 |
| Polydnaviridae | DNA | d | 230 | 181 | 80 | 331 | 333 |
| Coronaviridae | RNA | s | 237 | 13 | 10 | 24 | 24 |
| Circoviridae | DNA | s | 336 | 14 | 14 | 26 | 25 |
| Picornaviridae | RNA | s | 426 | 34 | 28 | 67 | 56 |
| Geminiviridae | DNA | s | 427 | 55 | 36 | 167 | 126 |
| Polyomaviridae | DNA | d | 499 | 20 | 10 | 28 | 24 |
| Flaviviridae | RNA | s | 522 | 34 | 26 | 81 | 68 |
| Reoviridae | RNA | d | 869 | 634 | 360 | >319 (58%)* | 866 |
| Hepadnaviridae | DNA | d | 975 | 6 | 6 | 8 | 12 |
| Bunyaviridae | RNA | s | 1010 | 207 | 125 | 449 | 326 |
| Retroviridae | RNA | s | 1348 | 64 | 44 | 164 | 124 |
| Orthomyxoviridae | RNA | s | 25237 | 236 | 145 | >242 (95%)* | 397 |

*Run did not complete in allotted time (100 hours). >319 (58%) indicates that with 319 primers, 58% of the target genomes were amplified.

[0147] Hypothetically, the worst case scenario to amplify a target set of N sequences would require 2N primers. MPP requires on average only 26%, 33%, 47% or 48% of this number for primers of length 10 nt without Tₘ constraints, 10 nt with Tₘ constraints, 17-18 nt, and 17-20 nt, respectively (averages across families for each column of Table 2). The most diverse families, in particular Reoviridae, Orthomyxoviridae (including all sequenced segments of influenza as well as other viruses in the family), Bunyaviridae, and Polydnaviridae, require so many primers that actually applying family-level amplification may well be infeasible. For these, more restricted target sets may be necessary, and possibly the incorporation of primers with degenerate or inosine bases. Some families with many genomes can be amplified with relatively few primers, such as Coronaviridae, Hepadnaviridae, Poxviridae, Togaviridae, Microviridae, and Polyomaviridae. All primer sequences are available in Appendix A.

[0148] The size of the family-level primer set increases with the number of sequences in the family (FIG. 9, p=0.003, least squares fit). The number of primers in the set is not significantly affected by whether the genomes are RNA or DNA (p=0.08) or double or single-stranded (p=0.11, interaction term for DNA/RNA×ds/ss has p=0.07), although the plot indicates there is a trend for dsRNA genomes to require relatively more primers when controlling for the effect of the number of target sequences available.

[0149] Primer design with the software described above indicates that relatively few primers are required to amplify all sequenced genomes of HIV-1, FMDV, and Norwalk virus (Table 3).

TABLE 3

| | | | Number of | Longest |
|---|---|---|---|---|
| | Number | | 17-18-mer | conserved |
| | of | Number of | primers in | region from |
| Virus Species | sequences | 10-mers | set | MSA (nt) |
| NA segment of | 6375 | 52 | 120 | 5 |
| Influenza A* | | | | |
| HA segment of | 5440 | 73 | 153 | 1 |
| Influenza A* | | | | |
| HIV-1 | 1175 | 6 | 16 | 0 |
| FMDV | 187 | 4 | 6 | 9 |
| Norwalk | 41 | 7 | 20 | 6 |

*For Influenza A HA and NA segments, all complete sequences, including lab strains, from all hosts, countries, and serotypes were downloaded from the NCBI Influenza Virus Resource database (http://www.ncbi.nlm.nih.gov/genomes/FLU/Database/multiple.cgi) on Jan. 18, 2008.

[0150] Influenza A HA and NA segments demand large numbers of 10-mer or 17-18-mer primers, so one could break these into subgroups, possibly by serotype, as shown for several HA serotypes in Table 4.

TABLE 4

| Influenza A | Number of | Number of 18- |
|---|---|---|
| HA Serotype | sequences | mer primers in set |
| H1 | 1080 | 24 |
| H2 | 108 | 8 |
| H3 | 1972 | 15 |
| H5 | 1325 | 16 |
| H7 | 256 | 8 |

[0151] The percentage of genomes amplified versus the number of primers used, for primers of either 10-mers or 17-18-mers, is shown in FIGS. 10 and 11. These plots show that a large fraction of targets are amplified with only 2 primers, and the addition of subsequent primers shows diminishing returns in amplifying fewer, more divergent targets not detected by the initial, more conserved, primer pair.

[0152] The more traditional method of attempting to find primers from a multiple sequence alignment would be problematic, probably requiring manually designed primer multiplexes or highly degenerate primers. For HIV-1, for example, there is not a single position with 100% conservation across all sequenced isolates. Dropping the required conservation down to 95% (58 of the 1175 genomes could disagree with a consensus base at any position), there are 3 conserved regions of at least 18 bases, with positions relative to the consensus: ACAGGAGCAGATGATACAGTA (SEQ ID NO: 11,335) starting at position 3665; TATGGAAAACAGATGGCAGG (SEQ ID NO: 11,336) starting at 7347; and CTATGGCAGGAAGAAGCG (SEQ ID NO: 11,337) starting at 9071. These regions are too far apart to be used as primers for most polymerases used in diagnostic PCR protocols, where amplicons must typically be less than 300 bases long for efficient amplification. A recently published study [ref. 30] selected primers from the 5′ LTR U5 end to the Gag-Pol start (5′-TAGCAGTGGCGCCCGA-3′ (SEQ ID NO: 11,338) and 5′-TCTCTCTCCTTCTAGCCTCCGC-3′ (SEQ ID NO: 11,339), but a comparison against available genomic data indicates that 487 of the 1175 genomes (41%) do not contain a sequence match for this primer pair, so may fail to be amplified.

[0153] For Influenza A segment HA, the size of the longest conserved region from the 95% consensus is only 5 bases, and for segment NA, only 6 bases, insufficient for even a single primer. For FMDV and Norwalk virus, the longest 100% conserved regions are 9 and 6 bases, respectively, too short for a primer. Thus, for highly diverse and large targets such as these, one option for primer design is careful manual selection by an expert in multiplex and/or degenerate PCR. Applicants tried several freely available tools, and found that they had difficulty scaling for large target sets (see below). MPP software makes it straightforward for a non-expert to determine a multiplex-compatible set of conserved primers, even for enormous and heterogeneous target sets that cannot be aligned.

[0154] For comparison, Applicants considered other software options for designing primers for these heterogeneous viruses. Applicants tried Primaclade® [ref. 34], but the web server timed out for Norwalk and FMDV alignments. The link to the MuPlex [ref. 40] server was not functional, and in any case the file size limit of 500 Kb would have been exceeded by all but the Norwalk data set. The PDA-MS/UniQ software [ref. 35] was not available for download or on a public web server. CODEHOP [ref. 41] requires protein alignment as input so is not appropriate for whole-genome (nucleotide) alignments.

[0155] SCPrimer [ref. 36] did generate a number of degenerate primer candidates from the multiple sequence alignment, requiring the user to manually select a combination of forward and reverse groups from a set of options. Applicants ran SCPrimer using length, Tₘ, etc. settings mirroring or more lenient than those Applicants used for Table 3 (Tₘ=55-65° C., GC %=20-80%, length 17-25 bp, 100% coverage, product size 80-620 bp, allowed Tₘ difference 10° C., others left as defaults). HYDEN [ref. 38] also generated degenerate candidates from the multiple sequence alignment, although it does not check Tₘ and the length is limited to a single value rather than a range (Applicants set it at 18 rather than 17 because of the lack of Tₘ control, and allowed 0 mismatches). The SCPrimer option requiring the fewest total primers for the Norwalk set required 18 primers, 4 of which had either 2-fold or 4-fold degeneracy so the actual number of priming sequences would be 26, compared to a total of 20 non-degenerate primers predicted by MPP (Supplementary information). HYDEN generated 4 degenerate primers covering only 34 of 41 sequences, each with 3- or 4-fold degeneracy for Norwalk, which translates to 15 priming sequences in the reaction. Small degenerate priming sets (e.g. 4 primers in this case) are less expensive to purchase, but because of dilution effects from the many sequence combinations actually present (15 priming sequences in the PCR), sensitivity may be reduced compared to nondegenerate priming.

[0156] One would need to manually find primers to amplify the remaining seven sequences. For FMDV, SCPrimer generated a number of candidates, and manual inspection identified that the best of those primer combinations would require 6 primers, one of which had 2-fold and another had 3-fold degeneracy, totalling 9 actual priming sequences in a reaction (Appendix A). This compares with 2 primers each with 4-fold degeneracy using HYDEN (8 priming sequences in a reaction), to amplify 98% (183 of 187) targets, and 6 non-degenerate multiplex compatible primers for FMDV using MPP.

### Example 6

### Calculating Highly Conserved, Multiplexed Primer Sets

[0157] Here, Applicants outline a greedy algorithm used to calculate conserved sets of multiplexed primers to amplify fragments from each member of a target set of sequences. An exemplary source code is enclosed herewith as Appendix E incorporated herein by reference. First, Applicants enumerate all candidate oligos fitting requirements for length, Tₘ (see Table 5), and lack of hairpin formation (minimum hairpin ΔG was −5 kcal/mol).

TABLE 5
Tₘ (° C.) settings used in predicting universal primer sets

| | Length | | | | | | | | | | | | |
|---|---|---|---|---|---|---|---|---|---|---|---|---|---|
| | 6 | 7 | 8 | 9 | 10 | 11 | 12 | 13 | 14 | 15 | 16 | 17 | 18 |
| Tₘ min | 10 | 25 | 30 | 35 | 35 | 35 | 35 | 40 | 45 | 50 | 50 | 50 | 50 |
| Tₘ max | 35 | 40 | 45 | 50 | 50 | 50 | 50 | 55 | 60 | 65 | 70 | 70 | 70 |

[0158] Applicants rank pairs of these by the number of targets in which that pair occurs within a distance d of one another, and the most frequent pair is selected as primers.

[0159] The process is repeated for the remaining targets that would not have an amplicon from the first pair, with the added consideration that new oligos selected be predicted not to form dimers with other primers already in the bin, based on nearest neighbor thermodynamic predictions [ref. 16], allowing a primer dimer minimum ΔG of −7 kcal/mol. Primers are added to a bin until that bin contains 20 primers, at which point a new bin is begun, following the same process. Binning primers in groups of 20 avoids exclusion of the most highly conserved oligos because of primer dimer free energy constraints. In other embodiments, other bin sizes may be desired, and primer sets can be built by specifying more or fewer primers per bin.

[0160] An embodiment of the present disclosure on which Example 6 is based is shown in the flowchart of FIG. 7, which shows steps U1-U7 for performing a method to identify primers suitable for detecting target microorganisms.

[0161] The universal set of primers is the set of selected primers to amplify all genomes in the target set. The primers within a bin should be multiplexed into a single PCR reaction, but each bin run separately. Applicants calculated universal primers of length 5-18, and analyzed how primer length affects the number of primers in the universal set. The allowable range for distance d used here was between 80 and 620 bases, as this is reasonable for electrophoretic discrimination of bands or sequencing.

[0162] The number of primers in a universal viral set such that all viral genomes generate at least one amplicon is shown in FIG. 12. For segmented viruses, primers were designed so that an amplicon from each segment should be amplified, except for the case of Orthomyxovirida, in which primers were designed to only ensure amplification of MP segments, and Bunyaviridae, in which primers were designed to only ensure amplicons from L segments. With 10-mer primers, 1974 primers are required to detect all viral genomes, but this number drops by over half, down to 764 primers, if it is sufficient to detect only 90% of viral targets. For 9-mers, 1754 and 525 primers are required to detect 100% or 90%, respectively. Using longer primers such as 15-mers requires 3318 primers for 100% or 1246 primers for 90%. Requiring 7-mers with 25°≦Tₘ≦40° C., it is not possible to amplify all target genomes, since many do not contain pairs of 7-mers in the required Tₘ range within a PCR-amplifiable distance of one another. Tₘ constraints demand larger universal primer sets (FIG. 13) since some highly conserved primers may be eliminated because of Tₘ's outside the allowable range.

[0163] This is particularly true for shorter primers, since short primers more often fall below the allowable Tₘ range. In FIG. 13, the solid and dotted curves with Tₘ constraints are jagged because of the arbitrary increment in allowable Tₘ range that was specified for primers of different lengths. Removing any primer Tₘ or GC % constraints, the number of primers in a universal set for all viruses can drop by up to 83%: for 8-mer primers, the size of the universal set is 1000 primers or 172 primers for runs with Tₘ constraints versus without, respectively. The magnitude of this advantage is greater for shorter primers, which have low Tₘ's to begin with. Protocols for specific PCR amplification using short, low-Tₘ primers could be advantageous.

[0164] If primers are not separated into reaction bins of 20 primers/bin, and instead all mixed in a single reaction, using 10-mers, Applicants predict that 1008 primers would be required to ensure amplification of at least one fragment 80-620 bp from every viral genome. This is a savings of almost 50% of the total number of primers required, compared to binning the reactions. To ensure that this computation would complete, Applicants relaxed the primer dimer minimum ΔG to −11 (from −7 kcal/mol for the binned runs), and the calculation required 776 hrs.

[0165] Another alternative (to removing Tₘ constraints or combining primers in a single, unbinned reaction) for reducing the number of primers is to allow primer length variation while maintaining Tₘ within a specified range, although this requires substantially more memory to calculate. There was not enough memory to compute a universal set allowing primers of lengths between 12-15 bases on a 32 MB node. A universal set of 12-14-mers with 40°≦Tₘ≦55° C. requires 2805 primers grouped into 140 reaction bins, a savings of ˜200 primers compared to 13-mers alone with the same Tₘ range (3015 primers). Similarly, a universal viral set of primers ranging in size from 9-11-mers gives a savings of ˜200 primers compared to fixed length primers of size 9-mers with the same Tₘ range (Tₘ of 35-50° C., 1561 versus 1754 primers).

[0166] It is predicted that ˜2000 primers of length 10 would be required to amplify fragments from all currently sequenced viruses, or ˜3700 primers of length 18. With primers longer than 10 bases, however, it is likely that newly emerging, unsequenced viruses would go undetected

### Example 7

### Genome Targets Used in Calculations

### Viral Genomes

[0167] Our target set for the calculation of Example 6 was the set of all viral genomes and segments, using only the MP segment from Orthomyxoviridae and the L segment of Bunyaviridae, in order to limit the overrepresentation of these families, totaling 11,477 sequences on Apr. 25, 2007, when Applicants compiled the data. Including the MP segment and L segment of Orthomyxoviridae and Bunyaviridae, respectively, would have resulted in a total of 34,494 sequences, illustrating the large representation of those families in viral sequence databases. Draft sequences with multiple contigs were merged into a single sequence entry, with contigs separated by 1000 N's, a stretch sufficiently long (>d) so that primer pairs would not be designed to fall on different contigs.

[0168] Each calculation was performed on a single AMD Opteron 2.4 GHz processor with 16-32 GB of RAM. The total compute hours to generate the results described here was over 11,000 cpu-hours, taking advantage of high performance computing facilities at Lawrence Livermore National Laboratory.

[0169] Thus, viruses pose a unique challenge compared to bacteria, where 16s rRNA primers are highly conserved across the bacterial kingdom. Random amplification and sequencing of a few 100 nt fragments from an unknown virus is an alternative approach that is predicted to successfully characterize newly emerged viruses. Targeted amplification with a single or few (<10) pentamer or hexamer priming sequences is another possible strategy for viral amplification for detection/characterization that may work if the specific pentamers or hexamers are chosen wisely.

### Example 8

### Virus Detection Through Viral Genome Identification from Universal Viral Primer Sets

[0170] To deconvolute and characterize the PCR products, there must not be too many different amplicons per genome if the backend is via fragment length distributions, mass spectrometry, or sequencing (although microarray hybridization might be more flexible in this regard). One could envision that 1-10 amplicons per genome would allow adequate discrimination of genomes. Universal viral primer sets of size 7 or 8-mer primers result in 10's to 1000's of different amplicons per genome per bin, since multiple primers bind (some more than once) to each genome (FIG. 15). 9-mers generate approximately 1-10 amplicons for most genomes, and 10-15-mers usually generate only a single band. Using unbinned 10-mer primers run all within a single reaction (the set of 1008 primers described above), the mean and maximum number of amplicons per genome are 13.2 and 948, respectively, compared to a mean of 1 and maximum of 2.9 amplicons per genome using the 10-mers binned into groups of 20 primers/bin. So by using a larger multiplexed reaction, not only might primer multiplexing be more difficult, but also deconvoluting the products might be more challenging.

### Example 9

### Family Identification by Sequencing Fragments Amplified Using a Universal Primer Set

[0171] The products of amplification using a universal viral primer set could be sequenced, so the question arises of whether the amplified fragments can provide family-level characterization of unknown, newly emerged viruses.

[0172] Applicants extracted the sequence of the amplicons that should be generated using specific amplification with the universal 10-mer set and BLASTed those amplicon sequences against either other species in the same target family or viruses in other families (FIGS. 17 and 18).

[0173] This shows that on average 87% of the amplicons have BLAST hits in the correct family, with an average of 135 hits per amplicon. In contrast, only 11% of amplicons have BLAST hits in other, non-target families, with an average of 2.5 BLAST hits per amplicon

### Example 10

### Identification of Unknown Viruses

[0174] To determine the likelihood of detecting unknown/unsequenced viruses, Applicants performed the following simulations. The 29 most recently emerged species of viruses [ref. 14, 28] and their very similar subsequently discovered near neighbors (Table 6) were excluded from the target set of genomes, leaving 9741 sequences.

TABLE 6
Reference sequences of newly emerged viruses

Arenaviridae ref|NC_005077, NC_005082|Guanarito virus
Arenaviridae ref|NC_004296, NC_004297|Lassa virus
Arenaviridae ref|NC_006572, NC_006573|Mopeia Lassa reassortant 29
Bunyaviridae ref|NC_005215, NC_005216, NC_OO5217|Sin Nombre virus
Bunyaviridae ref|NC_005226, NC_005227, NC_005228|Tula virus, complete
Bunyaviridae ref|NC_005300, NC_005301, NC_005302|Crimean-Congo hemorrhagic fever virus
Bunyaviridae ref|NC_003466, NC_003467, NC_003468|Andes virus
Bunyaviridae ref|NC_002043, NC_002044, NC_002045|Rift Valley fever virus
Coronaviridae ref|NC_004718.3|gnl|NCBI_GENOMES|17014|gi|30271926|SARS coronavirus
Dicistroviridae ref|NC_003005.1|gnl|NCBI_GENOMES|15715|gi|14780876|Taura syndrome virus
Filoviridae ref|NC_006432.1|gnl|NCBI_GENOMES|18041|gi|55770807|Sudan ebolavirus
Filoviridae ref|NC_002549.1|gnl|NCBI_GENOMES|15507|gi|10313991|Zaire ebolavirus
Filoviridae ref|NC_001608.2|gnl|NCBI_GENOMES|10467|gi|13489275 Lake Victoria marburgvirus
Filoviridae ref|NC_004161.1|gnl|NCBI_GENOMES|16606|gi|22789222 Reston Ebola virus
Flaviviridae ref|NC_001563.2|gnl|NCBI_GENOMES|10411|gi|11528013 West Nile virus
Flaviviridae ref|NC_001437.1|gnl|NCBI_GENOMES|10160|gi|9626460|Japanese encephalitis virus
Flaviviridae ref|NC_004102.1|gnl|NCBI_GENOMES|16556|gi|22129792|Hepatitis C virus
Hepeviridae ref|NC_001434.1|gnl|NCBI_GENOMES|10157|gi|9626440|Hepatitis F virus
Paramyxoviridae ref|NC_002728.1|gnl|NCBI_GENOMES|15627|gi|13559808|Nipah virus
Paramyxoviridae ref|NC_007620.1|gnl|NCBI_GENOMES|19015|gi|82712717|Menangle virus
Paramyxoviridae ref|NC_001906.2|gnl|NCBI_GENOMES|13716|gi|29468603|Hendra virus
Paramyxoviridae ref|NC_004074.1|gnl|NCBI_GENOMES|16538|gi|22003842|Tioman virus
Retroviridae gi|1906382|gb|K03455.1|HIVHXB2CG Human immunodeficiency virus type 1 (HXB2),
complete genome; HIV1/HTLV-III/LAV
Retroviridae ref|NC_00 1870.1|gi|9629914|gnl|NCBI_GENOMES|13303|Simian-Human immunodeficiency
virus
Retroviridae ref|NC_001722.1|gnl|NCBI_GENOMES|10902|gi|9628880|Human immunodeficiency virus
Retroviridae ref|NC_001802.1|gnl|NCBI_GENOMES|12171|gi|9629357|Human immunodeficiency virus
Rhabdoviridae ref|NC_003243.1|gnl|NCBI_GENOMES|15865|gi|17158068|Australian bat lyssavirus
Togaviridae ref|NC_001786.1|gnl|NCBI_GENOMES|11742|gi|9629246|Barmah Forest virus
Togaviridae ref|NC_001449.1|gnl|NCBI_GENOMES|10176|gi|9626526|Venezuelan e|uine encephalitis
virus

[0175] Then sets of universal primers of lengths 7-15 were generated for this subset of sequence data that excluded the newly emerged viruses. These primers were then compared to each of the reference sequences of the newly emerged species, and the fraction that would have been detected was calculated (FIG. 16).

[0176] For 10 newly emerged viruses, the amplicon sequences predicted using the conserved universal set of 10-mer primers (as calculated for FIG. 12) were BLASTed against other species from the same family, and also against sequences from other families. The fraction of amplicons with BLAST hits in the correct target family was compared to the fraction with hits to incorrect, non-target families (FIG. 13). This estimates the ability of the conserved universal 10-mer primer set to correctly characterize newly emerging viruses as to family.

[0177] The ability to detect/discover uncharacterized or newly emerged viruses using viral universal primer sets depends strongly on primer size (FIG. 16). With 7 to 9-mers, Applicants' simulations indicate that the majority of newly emerged viruses would be detected, which in this case means that an amplicon should be generated. With 10-mers, more than half would have been detected. With primers longer than 10 bases, however, our simulations indicate that it is more likely that these newly emerged viruses would not have been detected. The amount of sequence data used to generate the universal primer sets also plays a role, such that with 9-10-mers, about 20% more newly emerged viruses could be detected (in the absence of sequence information for those unknowns and their subsequently discovered near neighbors) using primer sets generated in 2007 than in 2004.

### Example 11

### Effect of Increasing Availability of Sequence Data on Universal Primer Sets

[0178] Applicants evaluated how the growth of sequence availability could affect the size of the universal set, as well as our ability to detect unknown/unsequenced viruses, by compiling all viral genomes and segments available as of Jan. 1, 2004, totaling 9965 sequences. It was not necessary to exclude any Orthomyxoviridae or Bunyaviridae segments, because these sequences were not so deeply sequenced at that time.

[0179] First Applicants generated universal primer sets using all the data (FIG. 12). Applicants then determined how much of the 2007 sequence data would have been detectable using the 2004 primer sets (FIG. 14). In addition, Applicants excluded the newly emerged species as described above, generated universal sets, and determined how many of the newly emerged sequences Applicants would have been able to detect in January 2004 if Applicants had not had their sequences for designing the universal primer sets (FIG. 16).

[0180] The increase in sequence data between 2004 and 2007 requires approximately 700 more 10-mer primers to amplify all sequenced viruses in 2007 compared to 2004 (FIG. 13). While the increase in the number of sequences used between the two dates was only ˜15%, the number of primers required increased by 48%, illustrating the substantial increase in diversity represented by the additional sequence data. Using universal primer sets generated using the 2004 sequence data, comparison against the 2007 sequence data indicate that only ˜35% of the genomes sequenced in 2007 would have been detected using a set of 10 to 15-mer primers (FIG. 14). Shorter primers increase this fraction to over 60%, due to the higher likelihood of occurrence and conservation of shorter oligos.

### Example 12

### Random Amplification and Sequencing

[0181] An alternative strategy to specific amplification using universal primers is to perform amplification and sequencing of a few, randomly chosen fragments. To determine whether the sequences of randomly selected fragments of a specified length are likely to provide correct family classification of an unknown virus, simulations were performed by randomly selecting 10 fragments per length from each available genome of 10 newly emerged species (Australian bat lyssavirus, Crimean Congo hemorrhagic fever, Nipah, Hendra, Venezuelan equine encephalitis, West Nile, Ebola, Hanta, hepatitis C, and Marburg viruses), totalling 7250 fragments per length.

[0182] Each fragment was BLASTed against viruses in other families (non-target families), and also against viruses in the same family other than the species from which the fragments were derived. For Nipah and Hendra, since they are genetically so similar, both were excluded from the target family for BLASTing either of their fragments (i.e. they were treated as a single species).

[0183] Using tblastx, a positive BLAST hit required an e-value no more than 0.001 and a hit length of at least 17 amino acids (at least half the length of a 100 nt fragment, when translated to 33 amino acids). Results are plotted in FIGS. 19 and 20. To correct for disparities in the number of genomes per species, the average number of fragments with BLAST hits to target or non-target families was calculated for each species, and an overall mean h was calculated per fragment length from the mean values of all species.

[0184] The average number of BLAST hits per fragment is another measure of similarity (FIG. 20). The probability that an “unknown” has at least one BLAST hit in the correct family as a function of the number n of fragments sequenced and hits h_{target} is 1—(1—h)ⁿ, shown in FIG. 21. The probability of at least one BLAST hit in the correct family and no BLAST hits in the incorrect family is (1−(1−h_{target})ⁿ)(1−h_{non-target})ⁿ, in FIG. 22. In FIGS. 21 and 22 sequencing several 100 bp fragments is more informative as to correct viral family of an unknown than sequencing a single 1000 bp fragment.

[0185] Another strategy for viral characterization is random rather than specific amplification, followed by sequencing a small number of amplified fragments. Applicants did these simulations, using randomly chosen fragments of a given length instead of fragments amplified by a universal primer set (FIGS. 19 and 20). As with specifically amplified fragments, the chance of sequence similarity to other species in the correct family far exceeds that to viruses in other families. The percentage of specifically amplified fragments with BLAST hits exceeds that for randomly amplified fragments because the conserved primers target areas of higher sequence conservation than randomly selected fragments.

[0186] If viral characterization is to be done by sequencing randomly chosen fragments, the question arises of whether it is better to sequence more, shorter fragments or fewer, longer fragments. The fraction of fragments and number of hits per fragment from a newly emerged virus to known viruses increase with fragment length, although the increase shows diminishing returns for lengths over 100 bases. Thus, simulations indicate that 3 fragments of 100 bp would have a higher probability of classifying a virus as to the correct family, since the chance of BLAST hits to target family and not to non-target families is higher for 3 100-mer fragments than for other scenarios (FIGS. 21 and 22).

### Example 13

### Targeted Amplification with a Conserved 5-6-mer

[0187] A third strategy to amplify a limited number of fragments for sequencing from any virus might be to select a single (or few) very short, highly conserved sequence (e.g. 6 bases) with which to prime. Ideally, a single hexamer could be found that should amplify a small number of fragments per genome for every viral genome.

[0188] Applicants enumerated all 4096 hexamers and 1024 pentamers, and calculated all the amplicons that would be produced between length 70-1000 bp if primed by a single penta- or hexamer, for each of the 11,477 viral genomes and segments (including only the MP segment from Orthomyxoviridae and the L segment of Bunyaviridae, as described above). The range of 70-1000 bp limits amplicons to lengths feasible for PCR, electrophoresis, and sequencing. The number of genomes with at least one amplicon was determined, as well as the maximum and mean number of amplicons per genome (with mean calculated based on those with at least one), in order to identify the most promising short oligos to use for universal priming of viral genomes (FIGS. 23 and 24).

[0189] The third strategy Applicants investigated using bioinformatics was that of using a single pentamer or hexamer 3′ anchor sequence to amplify fragments from the maximum number of viral genomes, and ideally to amplify only a small number of fragments per genome for easy analysis by, for example, length, base composition, or sequence. As indicated in FIGS. 23 and 24, oligos exist that approach this goal (oligos giving points in the upper left corners of the plots), but none are perfect, so that either one risks missing some genomes and/or amplifying so many fragments that it would be difficult to decipher the results. The best sequences are shown in Table 7, and the complete list is available upon request from the Applicants.

| | | | | |
|---|---|---|---|---|
| | | | Mean # | Max # |
| | SEQ ID | # genomes | amplicons per | amplicons per |
| Sequence | NO | amplified | genome | genome |

| | | | | |
|---|---|---|---|---|
| AAATG | 11,340 | 10798 | 57 | 3523 |
| CAAGA | 11,341 | 10349 | 24 | 1421 |
| AATCC | 11,342 | 10250 | 20 | 1238 |
| TCAGG | 11,343 | 10065 | 15 | 617 |
| AGACC | 11,344 | 9902 | 13 | 560 |
| CACTT | 11,345 | 9892 | 16 | 1245 |
| TCCATG | 11,346 | 7066 | 5 | 68 |
| CCAAAA | 11,347 | 6477 | 6 | 116 |
| CATGGA | 11,348 | 6356 | 5 | 73 |
| CAAAGC | 11,349 | 6217 | 3 | 57 |
| CACTTG | 11,350 | 5894 | 3 | 123 |
| TCCATG | 11,346 | 9449 | 8 | 134 |
| and | and | | | |
| CAAAGC | 11,349 | | | |
| All 5 | 11,346- | 10703 | 40 | 1275 |
| hexamers | 11,349 | | | |

[0190] The pentamer AAATG (SEQ ID NO: 11,340) amplifies 10,798 of the 11,477 viral genomes, but the mean and maximum number of amplicons per genome is somewhat high, 57 and 3,523, respectively. Instead, the pentamer AGACC (SEQ ID NO: 11,344), which amplifies 9902 genomes with an average of 13 amplicons per genome and a maximum of 560 amplicons per genome, might enable easier amplicon characterization. The best hexamer amplifies only 7066 genomes, but only produces on average 4.6 bands/genome, and never more than 68. Combining two of the best hexamers, TCCATG (SEQ ID NO: 11,346) and CAAAGC (SEQ ID NO: 11,349) in a single reaction, generates amplicons in 9449 genomes, with an average and maximum of 8 and 134 amplicons per genome, respectively. Combining the 5 hexamers in Table 3 in a single reaction mix would amplify 10,703 genomes, with an average and maximum of 40 and 1275 amplicons per genome, which comes closer to our goal of maximizing genomes with amplicons while minimizing amplicons per genome, than using the single best pentamer.

[0191] The genomes that typically give many amplicons are long, for example, from the families Herpesviridae, Poxviridae, and Phycodnaviridae. One might amplify a sample in two separate reactions, one in which a more common penta- or hexamer were used to ensure amplification from all viruses, and the other with a less common oligo that would produce intelligible amplicon distributions even for long genomes. The 5-mer oligos used as 3′ anchor sequences by Nanda for viral detection [ref. 17], TTCTG (SEQ ID NO: 11,351) and TGTGG (SEQ ID NO: 11,352), are predicted to amplify 9,051 and 7415 of the total 11,477 viral genomes, respectively. The (mean, maximum) number of amplicons per genome for TTCTG (SEQ ID NO: 11,351) and TGTGG (SEQ ID NO: 11,352) are predicted to be (29, 2847) and (23, 826), respectively.

### Example 14

### Targeted Amplification with a Conserved 7-mer to 30-mer

[0192] Universal primer sets consisting of short (7-30 base pair) nucleic acid strands has been created that can be used to amplify sequences of target viral DNA/RNA. These primer sets were designed to amplify specific nucleic acid sequences of all viral complete genomes sequenced to date, as well primer sets designed separately for various subgroupings of the viruses, including for each of the vertebrate-infecting viral families. There are currently 28 known virus families that infect vertebrates. Fixing primer size at 10 bases (10-mer), requires between 2 and >700 primers in family-level universal sets (Table 8). The number of primers in a family's set increases with the number of available genomes for that family, as well as the diversity of the family, so Applicants anticipate that as new genomic sequences become available Applicants will need to update the universal primer sets identified so far. The sequences for representative sets of these primers are given in the enclosed Appendix A which makes part of the present specification and is herein incorporated by reference in its entirety.

TABLE 8

| | | number of | Number of | Number of | Maximum | Mean |
|---|---|---|---|---|---|---|
| | | genomes (or | primers, | primers, | number of | number of |
| | Family | segments) | 10-15-mers¹ | 10-mers² | amplicons³ | amplicons⁴ |
| 1 | Adenoviridae | 71 | 37 | 34 | 40 | 9.4 |
| 2 | Arenaviridae | 115 | 101 | 72 | 20 | 5.3 |
| 3 | Arteriviridae | 36 | 10 | 10 | 2 | 1.2 |
| 4 | Asfarviridae | 8 | 2 | 3 | 1 | 1.0 |
| 5 | Astroviridae | 14 | 13 | 12 | 4 | 2.1 |
| 6 | Birnaviridae | 12 | 18 | 16 | 2 | 1.2 |
| 7 | Bornaviridae | 9 | 2 | 2 | 1 | 1.0 |
| 8 | Bunyaviridae | 1004 | 144 | 402 | 25 | 5.5 |
| 9 | Caliciviridae | 70 | 53 | 43 | 9 | 2.8 |
| 10 | Circoviridae | 298 | 25 | 20 | 5 | 3.0 |
| 11 | Coronaviridae | 196 | 23 | 26 | 3 | 1.7 |
| 12 | Deltatvirus | 51 | 5 | 2 | 1 | 1.0 |
| 13 | Filoviridae | 54 | 13 | 10 | 3 | 1.3 |
| 14 | Flaviviridae | 503 | 82 | 65 | 13 | 4.2 |
| 15 | Hepadnaviridae | 901 | 15 | 11 | 10 | 5.3 |
| 16 | Herpesviridae | 80 | 47 | 43 | 168 | 22.0 |
| 17 | Iridoviridae | 13 | 16 | 12 | 2 | 1.3 |
| 18 | Orthomyxoviridae | 16480 | | 433+ | 28 | 6.6 |
| 19 | Papillomaviridae | 168 | 144 | 110 | 32 | 5.1 |
| 20 | Paramyxoviridae | 162 | 70 | 61 | 6 | 2.4 |
| 21 | Parvoviridae | 65 | 61 | 57 | 12 | 3.2 |
| 22 | Picornaviridae | 357 | 59 | 53 | 5 | 2.3 |
| 23 | Polyomaviridae | 454 | 28 | 26 | 5 | 2.1 |
| 24 | Poxviridae | 122 | 29 | 32 | 6 | 2.2 |
| 25 | Reoviridae | 852 | 736 | 695+ | 16 | 3.7 |
| 26 | Retroviridae | 1093 | 173 | 97 | 25 | 11.0 |
| 27 | Rhabdoviridae | 41 | 44 | 36 | 27 | 2.5 |
| 28 | Togaviridae | 96 | 31 | 26 | 8 | 3.0 |

¹Primer sets of 10-15-mers have 45 ≦ Tₘ ≦ 50° C., hairpin ΔG ≧ −3 kcal/mol, primer dimer ΔG ≧ −5 kcal/mol, and generate amplicons of length 70-550 bp for all sequences (genomes or segments) in each family.
²Primer sets of 10-mers have 40 ≦ Tₘ ≦ 65° C., hairpin ΔG ≧ −5 kcal/mol, primer dimer ΔG ≧ −7 kcal/mol, and generate amplicons of length 60-600 bp for all sequences (genomes or segments) in each family.
³Maximum number of amplicons produced by the family's universal primer set for any genome from the indicated family, for 10-mer primer set.
⁴Mean number of amplicons produced by the family's universal primer set across genomes from the indicated family, for 10-mer primer set.

[0193] Following nucleic acid amplification, the lengths of the resulting amplicon fragments can be determined through separation using gradient electrophoresis. Individual fragments from a given species or strain of virus creates a unique electrophoretic banding signature. Examples of some fragment length distributions are given in Appendices B-D herein incorporated by reference in their entirety. The average number of electrophoretic bands per genome ranges from 1 to 22 across the viral families, while the maximum number of bands per genome ranges from 1 to 168 bands (see Table 8). For those families in which a large number of primers are required in the multiplexed universal set (e.g. Bunyaviridae, Orthomyxoviridae, and Reoviridae) or a large number of bands are produced for some genomes (e.g. Herpesviridae, Adenoviridae), the family may be subdivided to generate several smaller sets of primers, each of which will amplify fewer bands in a given genome. Another approach could be to use the primer set generated for all sequenced viruses taken together (not divided by family), breaking out various subgroups of primer pairs based on predicted multiplex compatibility. For example, multiplexed primers could be grouped so as to avoid undesired primer dimers and to have very similar Tₘ values.

[0194] Simulations were performed based on existing sequence data. The results are illustrated in FIGS. 25 and 26. In particular, those simulations indicate that discovery of unknown viruses by observation of new banding patterns in the primer set for the correct family of the previously unknown virus is unlikely for primers longer than 7 bases, since the probability of ≧8-mers being conserved among both known and uncharacterized viruses is less than that of 6-mers or 7-mers being conserved (FIG. 25).

[0195] The approach herein described, allows a methodology and application for generating genetic signatures for rapid, species/strain level identification of all viruses and microbes. Universal primer sets consisting of short (7-30 base pairs) nucleic acid strands have been created that can be used to amplify sequences of target viral DNA/RNA. These primer sets were designed to amplify specific nucleic acid sequences in the currently sequenced, vertebrate infecting viruses. Primer sets of the most highly conserved oligos for each family were built such that at least one amplicon would be generated from every full genome currently available in that family. This document describes the algorithm and software built to find such universal primer sets, as well as gives a few examples of universal primer sets that have been predicted. The actual primers generated will depend upon the input specifications desired (e.g. primer length, melting temperature range, amplicon length range, etc.). Amplified fragment length and/or sequence can be further examined using sequencing reactions or electrophoresis in order to characterize the organism. For example, simulations based on SARS as an example organism indicate that sequencing 4 or 5 randomly selected 100-mer fragments should provide very high confidence (>95%) of correctly classifying a novel virus to its correct family. Using the primers in a universal set would be very useful as sequencing primers. Accordingly, the simulations illustrated in FIG. 25 support the conclusions that detection/discovery of unknown viruses in their correct family is unlikely for anything longer than 7-mers.

[0196] However, discovery of previously unknown viruses is very likely using 10-mer (or shorter) primer sets from any family (at least one family) that is not necessarily the correct family for the unknown virus (FIG. 26). Using longer than 10-mer primers, e.g. isothermal 10-15-mer primer sets, drastically reduces the chances of discovering unknown viruses, either in the unknown virus' correct family or in any other family. The simulations shown in FIG. 26, indicate that it is not possible to detect all known viruses using 10-mers requiring primer Tm=45-50° C. The acceptable range must be widened to allow primer Tₘ's as low as 40° C. if Applicants use 10-mers. With variable length, isothermal 10-15-mers with Tₘ=45-50° C., Applicants can detect all the known viruses, but most of the primers are longer than 10 bases. As a consequence, the simulations illustrated in FIG. 26, support the conclusions that detection/discovery of unknown viruses by primers in any family is likely for anything as long as 10-mers, but allowing longer primers drastically reduces the chance of discovery.

[0197] In some cases, instead of trying to selectively isolate and identify a given virus from a complex sample, every individual virus would be analyzed in parallel. By dealing with the sample in millions or billions of discrete sub-nanoliter volume reactors, every virus can, in parallel, be individually archived and analyzed. Primers and oligonucleotides determined by the proposed art would be added to the sample before it is divided. Because the microfluidic system is “digital”, the sample could be divided into manageable subsets and analyzed using any combination of different oligomer and multiplex size. For example, for practical reasons related to the difficulty in reaction kinetics created by simultaneously amplifying a huge number of different targets, one might divide the sample into bins based on the viral family of interest or the thermodynamics of primer dimer avoidance. Each subsample would then only contain primers specific for a given viral family, limiting the complexity of the amplification reaction. There is also a trade off between using small oligomers, which are likely to hit on any sample (including unknowns), versus using larger oligomers with more specificity. Smaller-mers require a more limited multiplex, but also reduce the fragment resolution since for some viruses the primers in a set may amplify multiple bands, making it difficult to differentiate each fragment size in the distribution.

### Software

[0198] All the steps of the methods herein described can be implemented as Perl® programs which call other underlying procedures or modules written in Perl® or other programs identifiable by a skilled person. The executable steps according to the methods and algorithms of the present disclosure can be stored on a medium, a computer or on a computer readable medium.

### Hardware

[0199] All the software programs were developed, tested and installed on a single AMD Opteron 2.4 GHz processor or a Sun Solaris Processor. All programs should also be able to run with minimal modification on any computer that runs PERL.

[0200] The examples set forth above are provided to give those of ordinary skill in the art a complete disclosure and description of how to make and use the embodiments of the polynucleotides, systems and methods of the disclosure, and are not intended to limit the scope of what the inventors regard as their disclosure. Modifications of the above-described modes for carrying out the disclosure that are obvious to persons of skill in the art are intended to be within the scope of the following claims. All patents and publications mentioned in the specification are indicative of the levels of skill of those skilled in the art to which the disclosure pertains. All references cited in this disclosure are incorporated by reference to the same extent as if each reference had been incorporated by reference in its entirety individually.

[0201] The entire disclosure of each document cited (including patents, patent applications, journal articles, abstracts, laboratory manuals, books, or other disclosures) in the Background, Summary, Detailed Description, and Examples is hereby incorporated herein by reference in its entirety.

[0202] Further, each of the source code (a 93 kb txt file created on August 18 herein submitted as Appendix E) and the sequence listing (a 2,230 kb txt file created on Aug. 21, 2008) submitted herewith in computer readable form is incorporated herein by reference in its entirety.

[0203] It is to be understood that the disclosures are not limited to particular compositions or biological systems, which can, of course, vary. It is also to be understood that the terminology used herein is for the purpose of describing particular embodiments only, and is not intended to be limiting. As used in this specification and the appended claims, the singular forms “a,” “an,” and “the” include plural referents unless the content clearly dictates otherwise. The term “plurality” includes two or more referents unless the content clearly dictates otherwise. Unless defined otherwise, all technical and scientific terms used herein have the same meaning as commonly understood by one of ordinary skill in the art to which the disclosure pertains.

[0204] Although any methods and materials similar or equivalent to those described herein can be used in the practice for testing of the specific examples of appropriate materials and methods are described herein.

[0205] A number of embodiments of the disclosure have been described. Nevertheless, it will be understood that various modifications may be made without departing from the spirit and scope of the present disclosure. Accordingly, other embodiments are within the scope of the following claims.

### REFERENCES

[0206] 1. Afonina, I., I. Ankoudinova, A. Mills, S. Lokhov, and P. Huynh. 2007. Primers with 5′ flaps improve real-time PCR. BioTechniques 43:770-774.
[0207] 2. Brownie, J., S. Shawcross, J. Theaker, D. Whitcombe, R. Ferrie, C. Newton, and S. Little. 1997. The elimination of primer-dimer accumulation in PCR. Nucleic Acids Research 25:3235-3241.
[0208] 3. DeSantis, T., E. Brodie, J. Moberg, I. Zubieta, Y. Piceno, and G. Andersen. 2007. High-density universal 16S rRNA microarray analysis reveals broader diversity than typical clone library when sampling the environment. Microbial Ecology 53:371-383.
[0209] 4. Ecker, D., J. Drader, J. Gutierrez, A. Gutierrez, J. Hannis, A. Schink, R. Sampath, and e. al. 2006. The Ibis T5000 universal biosensor: an automated platform for pathogen identification and strain typing. JALA 11:341-51.
[0210] 5. Edwards, R. A., and F. Rohwer. 2005. Viral metagenomics. Nat Rev Micro 3:504-510.
[0211] 6. Escutenaire, S., N. Mohamed, M. Isaksson, P. Thoren, B. Klingeborn, S. Belák, M. Berg, and J. Blomberg. 2007. SYBR Green real-time reverse transcription-polymerase chain reaction assay for the generic detection of coronaviruses. Archives of Virology 152:41-58.
[0212] 7. Gardner, S. N., T. A. Kuczmarski, E. A. Vitalis, and T. R. Slezak. 2003. Limitations of TaqMan PCR for Detecting Divergent Viral Pathogens Illustrated by Hepatitis A, B, C, and E Viruses and Human Immunodeficiency Virus. J. Clin. Microbiol. 41:2417-2427.
[0213] 8. Griffiths, D., P. Kellam, and R. Weiss. 07.06.2002 2002. Virus detection using degenerate PCR primers. International patent WO/2002/099130.
[0214] 9. Kistler, A., P. Avila, S. Rouskin, D. Wang, T. Ward, S. Yagi, D. Schnurr, D. Ganem, J. DeRisi, and H. Boushey. 2007. Pan-viral screening of respiratory tract infections in adults with and without asthma reveals unexpected human coronavirus and human rhinovirus diversity. J Infect Dis 196:817-25.
[0215] 10. Kistler, A., P. Avila, S. Rouskin, D. Wang, T. Ward, S. Yagi, D. Schnurr, D. Ganem, J. DeRisi, and H. Boushey. 2007. Pan-Viral Screening of Respiratory Tract Infections in Adults With and Without Asthma Reveals Unexpected Human Coronavirus and Human Rhinovirus Diversity. The Journal of Infectious Diseases 196:817-825.
[0216] 11. Lamson, D., N. Renwick, V. Kapoor, Z. Liu, G. Palacios, J. Ju, A. Dean, K. St. George, T. Briese, and W. IanLipkin. 2006. MassTag Polymeraseâ [symbol] □Chainâ [symbol] □Reaction Detection of Respiratory Pathogens, Including a New Rhinovirus Genotype, That Caused Influenzaâ [symbol] □Like Illness in New York State during 2004â [symbol] ″2005. The Journal of Infectious Diseases 194:1398-1402.
[0217] 12. Lin, B., K. M. Blaney, A. P. Malanoski, A. G. Ligler, J. M. Schnur, D. Metzgar, K. L. Russell, and D. A. Stenger. 2007. Using a Resequencing Microarray as a Multiple Respiratory Pathogen Detection Assay. J. Clin. Microbiol. 45:443-452.
[0218] 13. Lin, B., Z. Wang, G. J. Vora, J. A. Thornton, J. M. Schnur, D. C. Thach, K. M. Blaney, A. G. Ligler, A. P. Malanoski, J. Santiago, E. A. Walter, B. K. Agan, D. Metzgar, D. Seto, L. T. Daum, R. Kruzelock, R. K. Rowley, E. H. Hanson, C. Tibbetts, and D. A. Stenger. 2006. Broad-spectrum respiratory tract pathogen identification using resequencing DNA microarrays. Genome Res.: gr.4337206.
[0219] 14. Mackenzie, J., K. Chua, P. Daniels, B. Eaton, H. Fields, R. Hal, K. Halpin, C. Johansen, P. Kirkland, S. Lam, P. McMinn, D. Nisbet, R. Paru, A. Pyke, S. Ritchie, P. Siba, D. Smith, G. Smith, A. van den Hurk, L. Wang, and D. Williams. 2001. Emerging viral diseases of Southeast Asia and the Western Pacific. Emerging Infectious Diseases 7, supplement: 497-504.
[0220] 15. Margulies, M., M. Egholm, W. E. Altman, S. Attiya, J. S. Bader, L. A. Bemben, J. Berka, M. S. Braverman, Y.-J. Chen, Z. Chen, S. B. Dewell, L. Du, J. M. Fierro, X. V. Gomes, B. C. Godwin, W. He, S. Helgesen, C. H. Ho, G. P. Irzyk, S. C. Jando, M. L. I. Alenquer, T. P. Jarvie, K. B. Jirage, J.-B. Kim, J. R. Knight, J. R. Lanza, J. H. Leamon, S. M. Lefkowitz, M. Lei, J. Li, K. L. Lohman, H. Lu, V. B. Makhijani, K. E. McDade, M. P. McKenna, E. W. Myers, E. Nickerson, J. R. Nobile, R. Plant, B. P. Puc, M. T. Ronan, G. T. Roth, G. J. Sarkis, J. F. Simons, J. W. Simpson, M. Srinivasan, K. R. Tartaro, A. Tomasz, K. A. Vogt, G. A. Volkmer, S. H. Wang, Y. Wang, M. P. Weiner, P. Yu, R. F. Begley, and J. M. Rothberg. 2005. Genome sequencing in microfabricated high-density picolitre reactors. Nature 437:376-380.
[0221] 16. Markham, N., and M. Zuker. 2005. DINAMelt web server for nucleic acid melting prediction. Nucleic Acids Research 33:W577-W581.
[0222] 17. Nanda, S. 2007. Presented at the ASM Biodefense and Emerging Diseases Research Meeting, Washington, D.C.
[0223] 18. Palacios, G., P. Quan, O. Jabado, S. Conlan, D. Hirschberg, Y. Liu, J. Zhai, N. Renwick, J. Hui, H. Hegyi, A. Grolla, J. Strong, J. Towner, T. Geisbert, P. Jahrling, C. Büchen-Osmond, H. Ellerbrok, M. Sanchez-Seco, Y. Lussier, P. Formenty, M. Nichol, H. Feldmann, T. Briese, and W. Lipkin. 2007. Panmicrobial oligonucleotide array for diagnosis of infectious diseases. Emerg Infect Dis. 13:73-81.
[0224] 19. Pichon, J.-P., B. Bonnaud, and F. Mallet. 2007. Quantitative multiplex degenerate PCR for human endogenous retrovirus expression profiling. Nat. Protocols 1:2831-2838.
[0225] 20. Png, A., K. Choo, C. Lee, S. Leong, and O. Kon. 2006. Primer design for whole genome amplification using genetic algorithms. In Silico Biology 6: 1-10.
[0226] 21. Quan, P.-L., G. Palacios, O. J. Jabado, S. Conlan, D. L. Hirschberg, F. Pozo, P. J. M. Jack, D. Cisterna, N. Renwick, J. Hui, A. Drysdale, R. Amos-Ritchie, E. Baumeister, V. Savy, K. M. Lager, J. A. Richt, D. B. Boyle, A. Garcia-Sastre, I. Casas, P. Perez-Brena, T. Briese, and W. I. Lipkin. 2007. Detection of Respiratory Viruses and Subtype Identification of Influenza A Viruses by GreeneChipResp Oligonucleotide Microarray. J. Clin. Microbiol. 45:2359-2364.
[0227] 22. Sampath, R., T. A. Hall, C. Massire, F. Li, L. B. Blyn, M. W. Eshoo, S. A. Hofstadler, and D. J. Ecker. 2007. Rapid Identification of Emerging Infectious Agents Using PCR and Electrospray Ionization Mass Spectrometry. Ann. N.Y. Acad. Sci. 1102:109-120.
[0228] 23. Shuber, A., V. Grondin, and K. Klinger. 1995. A simplified procedure for developing multiplex PCRs. Genome Research 5:488-493.
[0229] 24. Wang, D., L. Coscoy, M. Zylberberg, P. Avila, H. Boushey, D. Ganem, and J. DeRisi. 2002. Microarray-based detection and genotyping of viral pathogens. PNAS 99.
[0230] 25. Wang, D., A. Urisman, Y. Liu, M. Springer, T. Ksiazek, and e. al. 2003. Viral Discovery and Sequence Recovery Using DNA Microarrays. PLoS Biology 1:e2 doi:10.1371/journal.pbio.0000002.
[0231] 26. Wang, X., L. Zhang, L. Jin, M. Jin, Z. Shen, S. An, F. Chao, and J. Ki. 2007. Development and application of an oligonucleotide microarray for the detection of food-borne bacterial pathogens. Applied Microbiology and Biotechnology 76:225-233.
[0232] 27. Welzel, T. M., W. J. Miley, T. L. Parks, J. J. Goedert, D. Whitby, and B. A. Ortiz-Conde. 2006. Real-Time PCR Assay for Detection and Quantification of Hepatitis B Virus Genotypes A to G. J. Clin. Microbiol. 44:3325-3333.
[0233] 28. Woolhouse, M. 2006. Where do emerging pathogens come from? Microbe 1:511-515.
[0234] 29. Altschul, S. F., T. Madden, A. Schaffer, J. Zhang, Z. Zhang, W. Miller, and D. Lipman. 1997. Gapped BLAST and PSI-BLAST: a new generation of protein database search programs. Nucleic Acids Res. 25:3389-3402.
[0235] 30. Casabianca, A., C. Gori, C. Orlandi, F. Forbici, C. Federico Perno, and M. Magnani. 2007. Fast and sensitive quantitative detection of HIV DNA in whole blood leucocytes by SYBR green I real-time PCR assay. Molecular and Cellular Probes 21:368-378.
[0236] 31. Chenna, R., H. Sugawara, T. Koike, R. Lopez, T. J. Gibson, D. G. Higgins, and J. D. Thompson. 2003. Multiple sequence alignment with the Clustal series of programs. Nucl. Acids Res. 31:3497-3500.
[0237] 32. Eddy, S. R. 1998. Profile hidden Markov models. Bioinformatics 14:755-763.
[0238] 33. Edgar, R. C. 2004. MUSCLE: multiple sequence alignment with high accuracy and high throughput. Nucl. Acids Res. 32:1792-1797.
[0239] 34. Gadberry, M. D., S. T. Malcomber, A. N. Doust, and E. A. Kellogg. 2005. Primaclade—a flexible tool to find conserved PCR primers across multiple species. Bioinformatics 21:1263-1264.
[0240] 35. Huang, Y.-C., C.-F. Chang, C.-h. Chan, T.-J. Yeh, Y.-C. Chang, C.-C. Chen, and C.-Y. Kao. 2005. Integrated minimum-set primers and unique probe design algorithms for differential detection on symptom-related pathogens. Bioinformatics 21:4330-4337.
[0241] 36. Jabado, O. J., G. Palacios, V. Kapoor, J. Hui, N. Renwick, J. Zhai, T. Briese, and W. I. Lipkin. 2006. Greene SCPrimer: a rapid comprehensive tool for designing degenerate primers from multiple sequence alignments. Nucl. Acids Res. 34:6605-6611.
[0242] 37. Jarman, S. N. 2004. Amplicon: software for designing PCR primers on aligned DNA sequences. Bioinformatics 20:1644-1645.
[0243] 38. Linhart, C., and R. Shamir. 2002. The degenerate primer design problem. Bioinformatics 18: S172-181.
[0244] 39. Markham, N., and M. Zuker. 2005. DINAMelt web server for nucleic acid melting prediction. Nucleic Acids Research 33:W577-W581.
[0245] 40. Rachlin, J., C. Ding, C. Cantor, and S. Kasif. 2005. MuPlex: multi-objective multiplex PCR assay design. Nucl. Acids Res. 33:W544-W547.
[0246] 41. Rose, T., J. Henikoff, and S. Henikoff. 2003. CODEHOP (COnsensus-DEgenerate Hybrid Oligonucleotide Primer) PCR primer design. Nucl. Acids Res. 31:3763-3766.

Lengthy table referenced here
US20090081675A1-20090326-T00001
Please refer to the end of the specification for access instructions.

LENGTHY TABLES
The patent application contains a lengthy table section. A copy of the table is available in electronic form from the USPTO web site (http://seqdata.uspto.gov/?pageRequest=docDetail&DocID=US20090081675A1). An electronic copy of the table will also be available from the USPTO upon request and payment of the fee set forth in 37 CFR 1.19(b)(3).

What is claimed is:

1. A method to identify a set of probe polynucleotides suitable for detecting a set of target microorganisms, the method comprising
identifying the set of target microorganisms;
identifying a set of rules to be satisfied by target sequences;
identifying a set of target polynucleotides by selecting one or more target polynucleotides, each target polynucleotide comprised in at least one microorganism of the target microorganisms, each target polynucleotide comprising a target sequence satisfying to the set of rules; and
identifying the set of probe polynucleotides by reverse complementing one or more of the target sequences of the target polynucleotides of the identified set of target polynucleotides.

2. The method of claim 1, wherein the probe polynucleotides are primers, whereby a set of primers is being identified, and the set of target polynucleotides comprises two or more target polynucleotides.

3. The method of claim 2, wherein identifying a set of target polynucleotides is performed by
identifying a first target polynucleotide and a second target polynucleotide in at least one microorganism of the set of target microorganisms,
wherein
the second target polynucleotide comprises a target sequence satisfying to a rule requiring detection of said at least one microorganism performed by the second target polynucleotide in combination with the first target polynucleotide, and
the set of primers includes a pair of primers identified by complementing target sequences of the first target polynucleotide or the second target polynucleotide.

4. The method of claim 2, wherein said identifying a set of target polynucleotides is performed by
identifying a first target polynucleotide and a second target polynucleotide in a first target microorganism of the set of target microorganisms, wherein the second target polynucleotide comprises a target sequence satisfying to a rule requiring detection of said first target microorganism performed by the second target polynucleotide in combination with the first target polynucleotide;
identifying at least one of the first and the second target polynucleotides in one or more additional target microorganisms, with the one or more additional target microorganisms different from the first target microorganism; and
identifying one or more additional target polynucleotides in the one or more additional target microorganisms, wherein the one or more additional target polynucleotides comprise one or more additional target sequences satisfying to a rule requiring detection of said one or more additional target microorganisms performed by said one or more additional target polynucleotides in combination with at least one of the first target polynucleotide and the second target polynucleotide,
wherein the set of primers includes a first pair of primers identified by complementing target sequences of the first target polynucleotide or the second target polynucleotide and a second pair of primers identified by complementing target sequences of at least one of the first target polynucleotide and the second target polynucleotide and target sequences of the one or more additional target polynucleotides.

5. The method of claim 2, wherein identifying a set of target polynucleotides is performed by
identifying a first target polynucleotide and a second target polynucleotide in a first target microorganism of the set of target microorganisms, wherein the second target polynucleotide comprises a target sequence satisfying to a rule requiring detection of said first target microorganism performed by the second target polynucleotide in combination with the first target polynucleotide; and
identifying at least a first additional target polynucleotide and a second additional target polynucleotide in at least a second additional target microorganism of the set of target microorganisms, wherein the second additional target polynucleotide comprises an additional target sequence satisfying to a rule requiring detection of said at least second additional target microorganism performed by the second additional target polynucleotide in combination with the at least first additional target polynucleotide,
wherein the set of primers includes a first pair of primers identified by complementing target sequences of the first target polynucleotide or the second target polynucleotide and an at least second additional pair of primers identified by complementing target sequences of the first additional target polynucleotide and the second additional target polynucleotide.

6. A method for identification of primers suitable for detection of target microorganisms, comprising the steps of:
i) identifying a first set of candidate oligonucleotides present in at least one of the target microorganisms;
ii) sorting the candidate oligonucleotides of the first set by number of target microorganisms in which they occur;
iii) identifying second and third sets of candidate oligonucleotides, said second and third sets comprising oligonucleotides lying within a distance range of the oligonucleotides of the first set of candidate oligonucleotides, the second set comprising oligonucleotides lying upstream of the first set, and the third set comprising oligonucleotides lying downstream of the first set;
iv) sorting the candidate oligonucleotides of the second and third sets by number of target microorganisms in which they occur;
v) selecting a most frequently occurring oligonucleotide from the first set as one primer and a most frequently occurring oligonucleotide from the second and third sets as another primer;
vi) if the other primer is selected from the second set, including a reverse complement of the one primer and the other primer in a set of selected primers; otherwise, if the other primer is selected from the third set, including the one primer and a reverse complement of other primer in the set of selected primers;
vii) updating a list of target microorganisms to be detected by eliminating from the list target microorganisms having valid amplicons generated by any combination of primers in the set of selected primers; and
viii) repeating steps ii) through vii) until a detectable amplicon has been generated by all target microorganisms to be detected.

7. The method of claim 6, wherein the candidate oligonucleotides of the first, second and third sets satisfy to one or more rules.

8. The method of claim 7, wherein the one or more rules are selected from the group consisting of length and Tm range.

9. The method of claim 6, wherein the first, second, and third sets of candidate oligonucleotides are built as hash tables.

10. The method of claim 6, wherein sorting the candidate oligonucleotides of the first set comprises excluding oligonucleotides forming hairpins and homodimers.

11. The method of claim 6, wherein sorting the candidate oligonucleotides of the first set comprises stopping at a predetermined number of candidate oligonucleotides.

12. The method of claim 6, wherein sorting the candidate oligonucleotides of the second and third sets comprises excluding oligonucleotides forming hairpins and homodimers.

13. The method of claim 6, wherein step v) is performed under the condition that the one primer and the other primer do not dimerize, in which case the next most frequently occurring oligonucleotide from the first set is selected as the one primer or the next most frequently occurring oligonucleotide from the second and third sets is selected as the other primer.

14. The method of claim 6, wherein, during selection, the set of selected primers is closed as soon as a predetermined number of primers is reached, and a new set of selected primers is opened for further primers.

15. A method for identification of primers suitable for detection of target microorganisms, comprising the steps of:
i) identifying a first set of candidate oligonucleotides present in at least one of the target microorganisms;
ii) sorting the candidate oligonucleotides of the first set by number of target microorganisms in which they occur;
iii) selecting a most frequently occurring oligonucleotide as one primer;
iii) for all target microorganisms containing the one primer, identifying a second set of candidate oligonucleotides within an upstream or downstream distance range of the one primer;
iv) sorting the candidate oligonucleotides of the second set by number of target microorganisms in which they occur;
v) selecting a most frequently occurring oligonucleotide from the sorted candidate oligonucleotides of the second set as another primer;
vi) if the other primer is downstream of the one primer, including the one primer and a reverse complement of the other primer in a set of selected primers; otherwise, if the other primer is upstream of the one primer, including a reverse complement of the one primer and the other primer in the set of selected primers;
vii) updating a list of target microorganisms to be detected by eliminating from the list target microorganisms having valid amplicons generated by any combination of primers in the set of selected primers; and
viii) repeating steps ii) through vii) until a detectable amplicon has been generated by all target microorganisms to be detected.

16. The method of claim 15, wherein the candidate oligonucleotides of the first and second sets satisfy to one or more rules.

17. The method of claim 16, wherein the one or more rules are selected from the group consisting of not forming hairpins, and not forming dimers.

18. A method for identification of primers suitable for detection of target microorganisms, comprising the steps of:
i) identifying a set of candidate oligonucleotides present in at least one of the target microorganisms;
ii) sorting pairs of the candidate oligonucleotides of the set by number of target microorganisms in which they occur within a predetermined distance from each other;
iii) selecting the most frequently occurring pair as a pair of primers;
iv) including the pair of primers in a set of selected primer pairs;
v) updating a list of target microorganisms to be detected by eliminating from the list target microorganisms having valid amplicons generated by any pair in the set of selected primer pairs; and
vi) repeating steps ii) through v) until a detectable amplicon has been generated by all target microorganisms to be detected.

19. The method of claim 18, wherein, during selection, the set of selected primer pairs is closed as soon as a predetermined number of pairs is reached, and a new set of selected primer pairs is opened for further primer pairs.

20. A set of probe polynucleotides suitable to detect a set of target microorganisms, the set of probe polynucleotides identifiable by the method of claim 1.

21. The set of probe polynucleotides of claim 20, comprising a polynucleotide having a sequence selected from the group consisting of SEQ ID NO: 1 to SEQ ID NO: 11,333 and SEQ ID NO: 11,340 to SEQ ID NO: 11,352.

22. A composition comprising the set of probe polynucleotides of claim 20 and a suitable carrier, vehicle or auxiliary agent.

23. A method to detect a set of target microorganisms in a sample, the method comprising
identifying the set of target microorganisms, each target microorganism of the set of target microorganisms comprising a target polynucleotide;
identifying a set of probe polynucleotides suitable for identification of the set of target microorganisms with the method of claim 1;
contacting the identified set of probe polynucleotides with the sample for a time and under condition to allow formation of a probe polynucleotide-target-polynucleotide complex, thus providing a set of probe-polynucleotide-target-polynucleotide complexes;
detecting the set of probe polynucleotide target polynucleotide complexes; and
comparing the set of detected probe-polynucleotide-target-polynucleotide complexes with a predetermined set of probe-polynucleotide-target polynucleotide complexes, each predetermined probe-polynucleotide-target polynucleotide complex of the predetermined set of probe-polynucleotide-target polynucleotide complexes associated with a target microorganism of the set of target microorganisms.

24. The method of claim 23, wherein the target microorganisms are virus or bacteria.

25. The method of claim 23, wherein the probe polynucleotides are primers, whereby a set of primers is being identified, and the probe-polynucleotide-target polynucleotide complexes are amplicons.

26. The method of claim 25, wherein contacting the identified set of probe polynucleotides with the sample is performed by partitioning the sample in a series of sub-samples; partitioning the set of primers in a series of subsets of primers and contacting any subset of primers of the series of subset of primers with any sub-sample of the series of sub-samples.

27. A system for detecting a set of target microorganisms in a sample, the system comprising
the set of probe polynucleotides of claim 20; and
a reagent for providing and/or detecting a complex of said probe polynucleotides with target polynucleotides of said target microorganisms.

28. The system of claim 27, wherein the reagent comprises a label for detecting a probe polynucleotide-target polynucleotide complex.

29. The system of claim 27, wherein said probe polynucleotides are primers and said complex is an amplicon of said target polynucleotides.

30. The system of claim 29, wherein said set of probe polynucleotides is comprised in the system as a series of subsets of primers.

31. A method to identify an unknown microorganism to be included in a set of microorganisms, the method comprising
identifying the set of target microorganisms, each target microorganism of the set of target microorganisms comprising a target polynucleotide;
identifying a set of probe polynucleotides suitable for the identification of the set of target microorganisms with the method of claim 1;
contacting the identified set of probe polynucleotides with the sample for a time and under condition to allow formation of probe-polynucleotide-target polynucleotide complex, thus providing a set of probe-polynucleotide-target polynucleotide complexes;
detecting the set of a probe-polynucleotide-target-polynucleotide complexes;
comparing the set of detected a probe-polynucleotide-target polynucleotide complexes with a set of predetermined probe-polynucleotide-target polynucleotide complexes, each predetermined probe-polynucleotide-target polynucleotide complex of the predetermined set of probe-polynucleotide-target polynucleotide complexes associated with a target microorganism of the set of target microorganisms; and
identifying a detected probe-polynucleotide-target polynucleotide complex that cannot be associated with any predetermined probe-polynucleotide-target polynucleotide complex of the set of probe polynucleotide-target polynucleotide complexes, the identified detected probe-polynucleotide-target polynucleotide complex associated with the unknown microorganism.

32. The method of claim 31, wherein the probe polynucleotides are primers and the probe-polynucleotide-target-polynucleotide complexes are amplicons.

33. A system for identifying an unknown microorganism to be included in a set of microorganisms, the system comprising
the set of probe polynucleotides of claim 6; and
a reagent for providing and/or detecting a complex of said probe polynucleotides with target polynucleotides of said target microorganisms.

34. The system of claim 33, wherein the reagent comprises a label for detecting a probe polynucleotide-target polynucleotide complex.

The application's sequence listing, which the Patent Office published only in electronic form, follows.

SEQUENCE LISTING (11352 sequences)

SEQ ID NO: 1 - DNA, 10 bp, Artificial Sequence
  Synthetic Polynucleotide
tgatgcctga

SEQ ID NO: 2 - DNA, 10 bp, Artificial Sequence
  Synthetic Polynucleotide
tggcaacagg

SEQ ID NO: 3 - DNA, 10 bp, Artificial Sequence
  Synthetic Polynucleotide
agcacatcca

SEQ ID NO: 4 - DNA, 10 bp, Artificial Sequence
  Synthetic Polynucleotide
ggaggatggc

SEQ ID NO: 5 - DNA, 10 bp, Artificial Sequence
  Synthetic Polynucleotide
cccagggaga

SEQ ID NO: 6 - DNA, 10 bp, Artificial Sequence
  Synthetic Polynucleotide
ttggagccat

SEQ ID NO: 7 - DNA, 10 bp, Artificial Sequence
  Synthetic Polynucleotide
ctgctcgata

SEQ ID NO: 8 - DNA, 10 bp, Artificial Sequence
  Synthetic Polynucleotide
atgcagcaga

SEQ ID NO: 9 - DNA, 10 bp, Artificial Sequence
  Synthetic Polynucleotide
tattgggcgt

SEQ ID NO: 10 - DNA, 10 bp, Artificial Sequence
  Synthetic Polynucleotide
cctgtgacac

SEQ ID NO: 11 - DNA, 10 bp, Artificial Sequence
  Synthetic Polynucleotide
accgcatgtt

SEQ ID NO: 12 - DNA, 10 bp, Artificial Sequence
  Synthetic Polynucleotide
agcttcgggg

SEQ ID NO: 13 - DNA, 10 bp, Artificial Sequence
  Synthetic Polynucleotide
gcaaggacta

SEQ ID NO: 14 - DNA, 10 bp, Artificial Sequence
  Synthetic Polynucleotide
tgcaacacca

SEQ ID NO: 15 - DNA, 10 bp, Artificial Sequence
  Synthetic Polynucleotide
tggcaaagga

SEQ ID NO: 16 - DNA, 10 bp, Artificial Sequence
  Synthetic Polynucleotide
caggacaagc

SEQ ID NO: 17 - DNA, 10 bp, Artificial Sequence
  Synthetic Polynucleotide
tgacaagccc

SEQ ID NO: 18 - DNA, 10 bp, Artificial Sequence
  Synthetic Polynucleotide
gctggcaagg

SEQ ID NO: 19 - DNA, 10 bp, Artificial Sequence
  Synthetic Polynucleotide
gagcacatcc

SEQ ID NO: 20 - DNA, 10 bp, Artificial Sequence
  Synthetic Polynucleotide
attttggcga

SEQ ID NO: 21 - DNA, 10 bp, Artificial Sequence
  Synthetic Polynucleotide
tggtccagta

SEQ ID NO: 22 - DNA, 10 bp, Artificial Sequence
  Synthetic Polynucleotide
agcctgcaaa

SEQ ID NO: 23 - DNA, 10 bp, Artificial Sequence
  Synthetic Polynucleotide
tgattgccag

SEQ ID NO: 24 - DNA, 10 bp, Artificial Sequence
  Synthetic Polynucleotide
tggcaaggaa

SEQ ID NO: 25 - DNA, 10 bp, Artificial Sequence
  Synthetic Polynucleotide
gccccgaagc

SEQ ID NO: 26 - DNA, 10 bp, Artificial Sequence
  Synthetic Polynucleotide
atggatggga

SEQ ID NO: 27 - DNA, 10 bp, Artificial Sequence
  Synthetic Polynucleotide
tctgcattgc

SEQ ID NO: 28 - DNA, 10 bp, Artificial Sequence
  Synthetic Polynucleotide
attttggcga

SEQ ID NO: 29 - DNA, 10 bp, Artificial Sequence
  Synthetic Polynucleotide
gctccaaaga

SEQ ID NO: 30 - DNA, 10 bp, Artificial Sequence
  Synthetic Polynucleotide
aatgccccaa

SEQ ID NO: 31 - DNA, 10 bp, Artificial Sequence
  Synthetic Polynucleotide
cctgggtagc

SEQ ID NO: 32 - DNA, 10 bp, Artificial Sequence
  Synthetic Polynucleotide
agcaaaagca

SEQ ID NO: 33 - DNA, 10 bp, Artificial Sequence
  Synthetic Polynucleotide
tcgtctctgt

SEQ ID NO: 34 - DNA, 10 bp, Artificial Sequence
  Synthetic Polynucleotide
atgctgagga

SEQ ID NO: 35 - DNA, 10 bp, Artificial Sequence
  Synthetic Polynucleotide
acatggccca

SEQ ID NO: 36 - DNA, 10 bp, Artificial Sequence
  Synthetic Polynucleotide
gaggttggcc

SEQ ID NO: 37 - DNA, 10 bp, Artificial Sequence
  Synthetic Polynucleotide
acaagggtgt

SEQ ID NO: 38 - DNA, 10 bp, Artificial Sequence
  Synthetic Polynucleotide
gctgcattgc

SEQ ID NO: 39 - DNA, 10 bp, Artificial Sequence
  Synthetic Polynucleotide
gcagagtcca

SEQ ID NO: 40 - DNA, 10 bp, Artificial Sequence
  Synthetic Polynucleotide
catgctccca

SEQ ID NO: 41 - DNA, 10 bp, Artificial Sequence
  Synthetic Polynucleotide
ggggcattct

SEQ ID NO: 42 - DNA, 10 bp, Artificial Sequence
  Synthetic Polynucleotide
tctggggtgt

SEQ ID NO: 43 - DNA, 10 bp, Artificial Sequence
  Synthetic Polynucleotide
tgtctgctgc

SEQ ID NO: 44 - DNA, 10 bp, Artificial Sequence
  Synthetic Polynucleotide
tgtttggagc

SEQ ID NO: 45 - DNA, 10 bp, Artificial Sequence
  Synthetic Polynucleotide
tgacaagccc

SEQ ID NO: 46 - DNA, 10 bp, Artificial Sequence
  Synthetic Polynucleotide
aggaacagga

SEQ ID NO: 47 - DNA, 10 bp, Artificial Sequence
  Synthetic Polynucleotide
gcaatcagga

SEQ ID NO: 48 - DNA, 10 bp, Artificial Sequence
  Synthetic Polynucleotide
gctggtttca

SEQ ID NO: 49 - DNA, 10 bp, Artificial Sequence
  Synthetic Polynucleotide
gcccacatga

SEQ ID NO: 50 - DNA, 10 bp, Artificial Sequence
  Synthetic Polynucleotide
tggtacggtt

SEQ ID NO: 51 - DNA, 10 bp, Artificial Sequence
  Synthetic Polynucleotide
cttgcaatgc

SEQ ID NO: 52 - DNA, 10 bp, Artificial Sequence
  Synthetic Polynucleotide
gtttggtgca

SEQ ID NO: 53 - DNA, 10 bp, Artificial Sequence
  Synthetic Polynucleotide
cccgaagcta

SEQ ID NO: 54 - DNA, 10 bp, Artificial Sequence
  Synthetic Polynucleotide
acggatggga

SEQ ID NO: 55 - DNA, 10 bp, Artificial Sequence
  Synthetic Polynucleotide
aggtcccgtt

SEQ ID NO: 56 - DNA, 10 bp, Artificial Sequence
  Synthetic Polynucleotide
ggaggttggt

SEQ ID NO: 57 - DNA, 10 bp, Artificial Sequence
  Synthetic Polynucleotide
gcaacactgc

SEQ ID NO: 58 - DNA, 10 bp, Artificial Sequence
  Synthetic Polynucleotide
gggctctttg

SEQ ID NO: 59 - DNA, 10 bp, Artificial Sequence
  Synthetic Polynucleotide
gtgctaggga

SEQ ID NO: 60 - DNA, 10 bp, Artificial Sequence
  Synthetic Polynucleotide
gcaggggagt

SEQ ID NO: 61 - DNA, 10 bp, Artificial Sequence
  Synthetic Polynucleotide
gggatgcttc

SEQ ID NO: 62 - DNA, 10 bp, Artificial Sequence
  Synthetic Polynucleotide
gggtcagagg

SEQ ID NO: 63 - DNA, 10 bp, Artificial Sequence
  Synthetic Polynucleotide
gaactggcga

SEQ ID NO: 64 - DNA, 10 bp, Artificial Sequence
  Synthetic Polynucleotide
catggagagc

SEQ ID NO: 65 - DNA, 10 bp, Artificial Sequence
  Synthetic Polynucleotide
tgttggcatg

SEQ ID NO: 66 - DNA, 10 bp, Artificial Sequence
  Synthetic Polynucleotide
aaagcagggg

SEQ ID NO: 67 - DNA, 10 bp, Artificial Sequence
  Synthetic Polynucleotide
actccccaga

SEQ ID NO: 68 - DNA, 10 bp, Artificial Sequence
  Synthetic Polynucleotide
gcccacatta

SEQ ID NO: 69 - DNA, 10 bp, Artificial Sequence
  Synthetic Polynucleotide
ggttggtacg

SEQ ID NO: 70 - DNA, 10 bp, Artificial Sequence
  Synthetic Polynucleotide
gcttgcttcc

SEQ ID NO: 71 - DNA, 10 bp, Artificial Sequence
  Synthetic Polynucleotide
aatgcgacct

SEQ ID NO: 72 - DNA, 10 bp, Artificial Sequence
  Synthetic Polynucleotide
gggtggacat

SEQ ID NO: 73 - DNA, 10 bp, Artificial Sequence
  Synthetic Polynucleotide
tcttggaccc

SEQ ID NO: 74 - DNA, 17 bp, Artificial Sequence
  Synthetic Polynucleotide
gcaaatgttgcacctaa

SEQ ID NO: 75 - DNA, 17 bp, Artificial Sequence
  Synthetic Polynucleotide
tggatttcctttgccat

SEQ ID NO: 76 - DNA, 17 bp, Artificial Sequence
  Synthetic Polynucleotide
agccatccagctacact

SEQ ID NO: 77 - DNA, 17 bp, Artificial Sequence
  Synthetic Polynucleotide
ggttaccatgcaaacaa

SEQ ID NO: 78 - DNA, 17 bp, Artificial Sequence
  Synthetic Polynucleotide
cccagggagaccaaaag

SEQ ID NO: 79 - DNA, 17 bp, Artificial Sequence
  Synthetic Polynucleotide
agcacacaaaatgccat

SEQ ID NO: 80 - DNA, 18 bp, Artificial Sequence
  Synthetic Polynucleotide
gctcgataccgtactata

SEQ ID NO: 81 - DNA, 17 bp, Artificial Sequence
  Synthetic Polynucleotide
tggacatacaatgctga

SEQ ID NO: 82 - DNA, 17 bp, Artificial Sequence
  Synthetic Polynucleotide
gccccgaagctaaacca

SEQ ID NO: 83 - DNA, 18 bp, Artificial Sequence
  Synthetic Polynucleotide
gcatcaaaatgcacaagg

SEQ ID NO: 84 - DNA, 17 bp, Artificial Sequence
  Synthetic Polynucleotide
gtgtattgggcgtcttg

SEQ ID NO: 85 - DNA, 17 bp, Artificial Sequence
  Synthetic Polynucleotide
cacacagagcacaatgg

SEQ ID NO: 86 - DNA, 18 bp, Artificial Sequence
  Synthetic Polynucleotide
gagcacatccagaaactg

SEQ ID NO: 87 - DNA, 17 bp, Artificial Sequence
  Synthetic Polynucleotide
cagggatcaggatatgc

SEQ ID NO: 88 - DNA, 18 bp, Artificial Sequence
  Synthetic Polynucleotide
ggcacatcataagggtaa

SEQ ID NO: 89 - DNA, 18 bp, Artificial Sequence
  Synthetic Polynucleotide
tggttcagagttcctcaa

SEQ ID NO: 90 - DNA, 18 bp, Artificial Sequence
  Synthetic Polynucleotide
tccactatgtaagaccat

SEQ ID NO: 91 - DNA, 18 bp, Artificial Sequence
  Synthetic Polynucleotide
ggttgacacaataatgga

SEQ ID NO: 92 - DNA, 18 bp, Artificial Sequence
  Synthetic Polynucleotide
tgtcctctcattttccat

SEQ ID NO: 93 - DNA, 17 bp, Artificial Sequence
  Synthetic Polynucleotide
gaatccactcaaaaggc

SEQ ID NO: 94 - DNA, 18 bp, Artificial Sequence
  Synthetic Polynucleotide
gcaatccttcagaatgag

SEQ ID NO: 95 - DNA, 18 bp, Artificial Sequence
  Synthetic Polynucleotide
tgcattggttatcatgca

SEQ ID NO: 96 - DNA, 18 bp, Artificial Sequence
  Synthetic Polynucleotide
tagaaacaagggtgtttt

SEQ ID NO: 97 - DNA, 17 bp, Artificial Sequence
  Synthetic Polynucleotide
tggtttagcttcggggc

SEQ ID NO: 98 - DNA, 17 bp, Artificial Sequence
  Synthetic Polynucleotide
tgacaagcccacaaaat

SEQ ID NO: 99 - DNA, 17 bp, Artificial Sequence
  Synthetic Polynucleotide
atagagaatggctggca

SEQ ID NO: 100 - DNA, 17 bp, Artificial Sequence
  Synthetic Polynucleotide
cagttgagtagatcgcc

SEQ ID NO: 101 - DNA, 18 bp, Artificial Sequence
  Synthetic Polynucleotide
aacactcaattcacagct

SEQ ID NO: 102 - DNA, 17 bp, Artificial Sequence
  Synthetic Polynucleotide
cccagggagactaacaa

SEQ ID NO: 103 - DNA, 18 bp, Artificial Sequence
  Synthetic Polynucleotide
tgatcagaaaagcacaca

SEQ ID NO: 104 - DNA, 18 bp, Artificial Sequence
  Synthetic Polynucleotide
taaagaaactatcggctg

SEQ ID NO: 105 - DNA, 17 bp, Artificial Sequence
  Synthetic Polynucleotide
gcagtagcaaatggaac

SEQ ID NO: 106 - DNA, 18 bp, Artificial Sequence
  Synthetic Polynucleotide
tagttgagcaagattcaa

SEQ ID NO: 107 - DNA, 18 bp, Artificial Sequence
  Synthetic Polynucleotide
caccaaaggaagagatgt

SEQ ID NO: 108 - DNA, 17 bp, Artificial Sequence
  Synthetic Polynucleotide
gtgtcacaggaacattg

SEQ ID NO: 109 - DNA, 18 bp, Artificial Sequence
  Synthetic Polynucleotide
gataaaatctgcatcggc

SEQ ID NO: 110 - DNA, 18 bp, Artificial Sequence
  Synthetic Polynucleotide
cgctctatgaagacatcc

SEQ ID NO: 111 - DNA, 17 bp, Artificial Sequence
  Synthetic Polynucleotide
tgggacaatggtgaaaa

SEQ ID NO: 112 - DNA, 17 bp, Artificial Sequence
  Synthetic Polynucleotide
ccaacctccttctatga

SEQ ID NO: 113 - DNA, 18 bp, Artificial Sequence
  Synthetic Polynucleotide
catggtatggacacattc

SEQ ID NO: 114 - DNA, 17 bp, Artificial Sequence
  Synthetic Polynucleotide
gccccgaagctaaacca

SEQ ID NO: 115 - DNA, 18 bp, Artificial Sequence
  Synthetic Polynucleotide
atggagagcataaggaac

SEQ ID NO: 116 - DNA, 18 bp, Artificial Sequence
  Synthetic Polynucleotide
cacattccagattgtgtc

SEQ ID NO: 117 - DNA, 17 bp, Artificial Sequence
  Synthetic Polynucleotide
tggtcctacatcgtcga

SEQ ID NO: 118 - DNA, 18 bp, Artificial Sequence
  Synthetic Polynucleotide
taaccataccatccatct

SEQ ID NO: 119 - DNA, 18 bp, Artificial Sequence
  Synthetic Polynucleotide
cacgaagtgtcaaacacc

SEQ ID NO: 120 - DNA, 18 bp, Artificial Sequence
  Synthetic Polynucleotide
gtacaacgaacatttcca

SEQ ID NO: 121 - DNA, 17 bp, Artificial Sequence
  Synthetic Polynucleotide
tacagcagtgttgcctc

SEQ ID NO: 122 - DNA, 18 bp, Artificial Sequence
  Synthetic Polynucleotide
gattgccagtgacaagga

SEQ ID NO: 123 - DNA, 18 bp, Artificial Sequence
  Synthetic Polynucleotide
ggacatataatgccgaac

SEQ ID NO: 124 - DNA, 18 bp, Artificial Sequence
  Synthetic Polynucleotide
tagatttccagttgcttc

SEQ ID NO: 125 - DNA, 18 bp, Artificial Sequence
  Synthetic Polynucleotide
agtctctaccagaatgca

SEQ ID NO: 126 - DNA, 18 bp, Artificial Sequence
  Synthetic Polynucleotide
ccttctatgaatcctgct

SEQ ID NO: 127 - DNA, 18 bp, Artificial Sequence
  Synthetic Polynucleotide
tgggtgctataaattcca

SEQ ID NO: 128 - DNA, 18 bp, Artificial Sequence
  Synthetic Polynucleotide
tctatcattccagtccat

SEQ ID NO: 129 - DNA, 18 bp, Artificial Sequence
  Synthetic Polynucleotide
gatgccacatgccagact

SEQ ID NO: 130 - DNA, 17 bp, Artificial Sequence
  Synthetic Polynucleotide
cactagcgttccgtttg

SEQ ID NO: 131 - DNA, 18 bp, Artificial Sequence
  Synthetic Polynucleotide
cattgctttgagctacat

SEQ ID NO: 132 - DNA, 18 bp, Artificial Sequence
  Synthetic Polynucleotide
tgcatctacaagatccat

SEQ ID NO: 133 - DNA, 18 bp, Artificial Sequence
  Synthetic Polynucleotide
gcatttacagtacagtgg

SEQ ID NO: 134 - DNA, 18 bp, Artificial Sequence
  Synthetic Polynucleotide
acatgatccattactgca

SEQ ID NO: 135 - DNA, 18 bp, Artificial Sequence
  Synthetic Polynucleotide
ctggactgatcaatggat

SEQ ID NO: 136 - DNA, 17 bp, Artificial Sequence
  Synthetic Polynucleotide
attctgtctgcaagcat

SEQ ID NO: 137 - DNA, 17 bp, Artificial Sequence
  Synthetic Polynucleotide
gcagggttcatagaagg

SEQ ID NO: 138 - DNA, 18 bp, Artificial Sequence
  Synthetic Polynucleotide
acatccagaagctgattg

SEQ ID NO: 139 - DNA, 18 bp, Artificial Sequence
  Synthetic Polynucleotide
tcaccatcaaaatgagca

SEQ ID NO: 140 - DNA, 18 bp, Artificial Sequence
  Synthetic Polynucleotide
tgcaatggcaagaagtag

SEQ ID NO: 141 - DNA, 17 bp, Artificial Sequence
  Synthetic Polynucleotide
atggtcctacaatgctg

SEQ ID NO: 142 - DNA, 18 bp, Artificial Sequence
  Synthetic Polynucleotide
tgttgtatgctgtgtcca

SEQ ID NO: 143 - DNA, 18 bp, Artificial Sequence
  Synthetic Polynucleotide
ggaatccctccacttgaa

SEQ ID NO: 144 - DNA, 18 bp, Artificial Sequence
  Synthetic Polynucleotide
ggaatccagtttcactcc

SEQ ID NO: 145 - DNA, 17 bp, Artificial Sequence
  Synthetic Polynucleotide
tgttcgaaacctccatg

SEQ ID NO: 146 - DNA, 18 bp, Artificial Sequence
  Synthetic Polynucleotide
taccaaccatctaccatt

SEQ ID NO: 147 - DNA, 18 bp, Artificial Sequence
  Synthetic Polynucleotide
tgtggtatggcttatcaa

SEQ ID NO: 148 - DNA, 18 bp, Artificial Sequence
  Synthetic Polynucleotide
tacaaatgttgcatctgc

SEQ ID NO: 149 - DNA, 18 bp, Artificial Sequence
  Synthetic Polynucleotide
tcaccatttattcgactg

SEQ ID NO: 150 - DNA, 17 bp, Artificial Sequence
  Synthetic Polynucleotide
agtgtgaagaacggcac

SEQ ID NO: 151 - DNA, 17 bp, Artificial Sequence
  Synthetic Polynucleotide
atggcaaaggaaatcca

SEQ ID NO: 152 - DNA, 18 bp, Artificial Sequence
  Synthetic Polynucleotide
tccatcaaatcgaaaagg

SEQ ID NO: 153 - DNA, 17 bp, Artificial Sequence
  Synthetic Polynucleotide
gcagagtttatgtgggg

SEQ ID NO: 154 - DNA, 18 bp, Artificial Sequence
  Synthetic Polynucleotide
acaactcaacagatacgg

SEQ ID NO: 155 - DNA, 17 bp, Artificial Sequence
  Synthetic Polynucleotide
gtgcatcgcatgtttcc

SEQ ID NO: 156 - DNA, 17 bp, Artificial Sequence
  Synthetic Polynucleotide
tggtttagcttcggggc

SEQ ID NO: 157 - DNA, 17 bp, Artificial Sequence
  Synthetic Polynucleotide
aatgtcctcttggggca

SEQ ID NO: 158 - DNA, 17 bp, Artificial Sequence
  Synthetic Polynucleotide
gacacttgctacccatt

SEQ ID NO: 159 - DNA, 17 bp, Artificial Sequence
  Synthetic Polynucleotide
agcacatccaaagaccc

SEQ ID NO: 160 - DNA, 18 bp, Artificial Sequence
  Synthetic Polynucleotide
gcatcaactcagttaaga

SEQ ID NO: 161 - DNA, 18 bp, Artificial Sequence
  Synthetic Polynucleotide
tgtcactgtcacattctt

SEQ ID NO: 162 - DNA, 18 bp, Artificial Sequence
  Synthetic Polynucleotide
atgcagacacaatatgta

SEQ ID NO: 163 - DNA, 18 bp, Artificial Sequence
  Synthetic Polynucleotide
tacttgattgaattcccc

SEQ ID NO: 164 - DNA, 17 bp, Artificial Sequence
  Synthetic Polynucleotide
gccaaatgcaacacaaa

SEQ ID NO: 165 - DNA, 17 bp, Artificial Sequence
  Synthetic Polynucleotide
gggcagtttcctatagc

SEQ ID NO: 166 - DNA, 17 bp, Artificial Sequence
  Synthetic Polynucleotide
taccagagtctcagaag

SEQ ID NO: 167 - DNA, 17 bp, Artificial Sequence
  Synthetic Polynucleotide
tagatcgccaaaatctg

SEQ ID NO: 168 - DNA, 17 bp, Artificial Sequence
  Synthetic Polynucleotide
tgacgggatcactaaca

SEQ ID NO: 169 - DNA, 18 bp, Artificial Sequence
  Synthetic Polynucleotide
ggcttcactattgtccag

SEQ ID NO: 170 - DNA, 18 bp, Artificial Sequence
  Synthetic Polynucleotide
agagttcatcacagaagg

SEQ ID NO: 171 - DNA, 18 bp, Artificial Sequence
  Synthetic Polynucleotide
cacctcgtatggagtcat

SEQ ID NO: 172 - DNA, 18 bp, Artificial Sequence
  Synthetic Polynucleotide
ggattccaacatcagaac

SEQ ID NO: 173 - DNA, 18 bp, Artificial Sequence
  Synthetic Polynucleotide
attccgcctgattccctg

SEQ ID NO: 174 - DNA, 18 bp, Artificial Sequence
  Synthetic Polynucleotide
atgcagacaaaatttgcc

SEQ ID NO: 175 - DNA, 17 bp, Artificial Sequence
  Synthetic Polynucleotide
cctttgatctggaaccg

SEQ ID NO: 176 - DNA, 18 bp, Artificial Sequence
  Synthetic Polynucleotide
taccagagaaacaaacta

SEQ ID NO: 177 - DNA, 17 bp, Artificial Sequence
  Synthetic Polynucleotide
tcgttttccatgagcac

SEQ ID NO: 178 - DNA, 17 bp, Artificial Sequence
  Synthetic Polynucleotide
catagcaatgagcaggg

SEQ ID NO: 179 - DNA, 18 bp, Artificial Sequence
  Synthetic Polynucleotide
cccatttccaacagagac

SEQ ID NO: 180 - DNA, 18 bp, Artificial Sequence
  Synthetic Polynucleotide
tgaaagagcaccaagacc

SEQ ID NO: 181 - DNA, 18 bp, Artificial Sequence
  Synthetic Polynucleotide
aagagatgaggcgacagt

SEQ ID NO: 182 - DNA, 17 bp, Artificial Sequence
  Synthetic Polynucleotide
gtgaagagggcactggg

SEQ ID NO: 183 - DNA, 18 bp, Artificial Sequence
  Synthetic Polynucleotide
cccacaaaataaaggcta

SEQ ID NO: 184 - DNA, 18 bp, Artificial Sequence
  Synthetic Polynucleotide
agagaatgctgaggacaa

SEQ ID NO: 185 - DNA, 18 bp, Artificial Sequence
  Synthetic Polynucleotide
ccgaagctaaaccataag

SEQ ID NO: 186 - DNA, 17 bp, Artificial Sequence
  Synthetic Polynucleotide
caaaatgcacaaggaga

SEQ ID NO: 187 - DNA, 17 bp, Artificial Sequence
  Synthetic Polynucleotide
tgtcacacttatgccaa

SEQ ID NO: 188 - DNA, 18 bp, Artificial Sequence
  Synthetic Polynucleotide
ccaatcgagaactgtgat

SEQ ID NO: 189 - DNA, 18 bp, Artificial Sequence
  Synthetic Polynucleotide
agagatgaggcgacagtc

SEQ ID NO: 190 - DNA, 17 bp, Artificial Sequence
  Synthetic Polynucleotide
actcaagaagcagttga

SEQ ID NO: 191 - DNA, 18 bp, Artificial Sequence
  Synthetic Polynucleotide
tatagcaccaaataggcc

SEQ ID NO: 192 - DNA, 18 bp, Artificial Sequence
  Synthetic Polynucleotide
gtggagtacaggttgatg

SEQ ID NO: 193 - DNA, 17 bp, Artificial Sequence
  Synthetic Polynucleotide
ccctggatgtagcaatg

SEQ ID NO: 194 - DNA, 17 bp, Artificial Sequence
  Synthetic Polynucleotide
acaacgggaagggatgt

SEQ ID NO: 195 - DNA, 17 bp, Artificial Sequence
  Synthetic Polynucleotide
attccgcatccctgttg

SEQ ID NO: 196 - DNA, 17 bp, Artificial Sequence
  Synthetic Polynucleotide
tgaggtcagatgcacct

SEQ ID NO: 197 - DNA, 18 bp, Artificial Sequence
  Synthetic Polynucleotide
gctagtctctccattggt

SEQ ID NO: 198 - DNA, 18 bp, Artificial Sequence
  Synthetic Polynucleotide
gacatttgttatccaggc

SEQ ID NO: 199 - DNA, 18 bp, Artificial Sequence
  Synthetic Polynucleotide
ggtttggcactttgtgtc

SEQ ID NO: 200 - DNA, 17 bp, Artificial Sequence
  Synthetic Polynucleotide
atggaacatgctacccc

SEQ ID NO: 201 - DNA, 18 bp, Artificial Sequence
  Synthetic Polynucleotide
tattctgcactgtaaaga

SEQ ID NO: 202 - DNA, 17 bp, Artificial Sequence
  Synthetic Polynucleotide
accagattttggcgata

SEQ ID NO: 203 - DNA, 18 bp, Artificial Sequence
  Synthetic Polynucleotide
ggacatttctgagccctg

SEQ ID NO: 204 - DNA, 18 bp, Artificial Sequence
  Synthetic Polynucleotide
gctcctcggtacgctttt

SEQ ID NO: 205 - DNA, 17 bp, Artificial Sequence
  Synthetic Polynucleotide
cattcctcatccctgtt

SEQ ID NO: 206 - DNA, 18 bp, Artificial Sequence
  Synthetic Polynucleotide
cactggcttcacttatgg

SEQ ID NO: 207 - DNA, 18 bp, Artificial Sequence
  Synthetic Polynucleotide
atccataccatccatcaa

SEQ ID NO: 208 - DNA, 18 bp, Artificial Sequence
  Synthetic Polynucleotide
aataaacagccctttgcc

SEQ ID NO: 209 - DNA, 18 bp, Artificial Sequence
  Synthetic Polynucleotide
accattacccatgtcttc

SEQ ID NO: 210 - DNA, 18 bp, Artificial Sequence
  Synthetic Polynucleotide
tccatcagattgaaaagg

SEQ ID NO: 211 - DNA, 18 bp, Artificial Sequence
  Synthetic Polynucleotide
caccctccttctatgaag

SEQ ID NO: 212 - DNA, 18 bp, Artificial Sequence
  Synthetic Polynucleotide
acaccctctcaccattgg

SEQ ID NO: 213 - DNA, 18 bp, Artificial Sequence
  Synthetic Polynucleotide
ttaccccacccattgacg

SEQ ID NO: 214 - DNA, 17 bp, Artificial Sequence
  Synthetic Polynucleotide
tgcttcttgtcttgaca

SEQ ID NO: 215 - DNA, 18 bp, Artificial Sequence
  Synthetic Polynucleotide
gttcagccttgattcttc

SEQ ID NO: 216 - DNA, 18 bp, Artificial Sequence
  Synthetic Polynucleotide
tgttcatccacttaccat

SEQ ID NO: 217 - DNA, 18 bp, Artificial Sequence
  Synthetic Polynucleotide
catttgcccttttgcagg

SEQ ID NO: 218 - DNA, 17 bp, Artificial Sequence
  Synthetic Polynucleotide
gaccacctgaatggggc

SEQ ID NO: 219 - DNA, 18 bp, Artificial Sequence
  Synthetic Polynucleotide
ggcattgtatgtccacac

SEQ ID NO: 220 - DNA, 18 bp, Artificial Sequence
  Synthetic Polynucleotide
tttcgagagcactggtaa

SEQ ID NO: 221 - DNA, 18 bp, Artificial Sequence
  Synthetic Polynucleotide
tattctgcctgattgacc

SEQ ID NO: 222 - DNA, 18 bp, Artificial Sequence
  Synthetic Polynucleotide
gatccatcacccgagtac

SEQ ID NO: 223 - DNA, 18 bp, Artificial Sequence
  Synthetic Polynucleotide
tccacaacagattcctgt

SEQ ID NO: 224 - DNA, 17 bp, Artificial Sequence
  Synthetic Polynucleotide
cgccactggatctaatg

SEQ ID NO: 225 - DNA, 17 bp, Artificial Sequence
  Synthetic Polynucleotide
tgagcatccgacatcat

SEQ ID NO: 226 - DNA, 18 bp, Artificial Sequence
  Synthetic Polynucleotide
gcaagtcatacacaaaca

SEQ ID NO: 227 - DNA, 10 bp, Artificial Sequence
  Synthetic Polynucleotide
tcaaaggccc

SEQ ID NO: 228 - DNA, 10 bp, Artificial Sequence
  Synthetic Polynucleotide
tagcatggtc

SEQ ID NO: 229 - DNA, 10 bp, Artificial Sequence
  Synthetic Polynucleotide
gccaagacca

SEQ ID NO: 230 - DNA, 10 bp, Artificial Sequence
  Synthetic Polynucleotide
tctgggttga

SEQ ID NO: 231 - DNA, 10 bp, Artificial Sequence
  Synthetic Polynucleotide
ccatgagcct

SEQ ID NO: 232 - DNA, 10 bp, Artificial Sequence
  Synthetic Polynucleotide
gtgctcagca

SEQ ID NO: 233 - DNA, 10 bp, Artificial Sequence
  Synthetic Polynucleotide
ccgtctggcc

SEQ ID NO: 234 - DNA, 10 bp, Artificial Sequence
  Synthetic Polynucleotide
ggtgtttgga

SEQ ID NO: 235 - DNA, 10 bp, Artificial Sequence
  Synthetic Polynucleotide
tccctgcata

SEQ ID NO: 236 - DNA, 10 bp, Artificial Sequence
  Synthetic Polynucleotide
caagggagcc

SEQ ID NO: 237 - DNA, 10 bp, Artificial Sequence
  Synthetic Polynucleotide
gtccttccca

SEQ ID NO: 238 - DNA, 10 bp, Artificial Sequence
  Synthetic Polynucleotide
ctgcatgtca

SEQ ID NO: 239 - DNA, 10 bp, Artificial Sequence
  Synthetic Polynucleotide
tttagcccca

SEQ ID NO: 240 - DNA, 10 bp, Artificial Sequence
  Synthetic Polynucleotide
tggtggacca

SEQ ID NO: 241 - DNA, 10 bp, Artificial Sequence
  Synthetic Polynucleotide
gcacttgcat

SEQ ID NO: 242 - DNA, 10 bp, Artificial Sequence
  Synthetic Polynucleotide
taggaacagc

SEQ ID NO: 243 - DNA, 10 bp, Artificial Sequence
  Synthetic Polynucleotide
cccatttgca

SEQ ID NO: 244 - DNA, 10 bp, Artificial Sequence
  Synthetic Polynucleotide
catggcacat

SEQ ID NO: 245 - DNA, 10 bp, Artificial Sequence
  Synthetic Polynucleotide
gtgtccaacc

SEQ ID NO: 246 - DNA, 10 bp, Artificial Sequence
  Synthetic Polynucleotide
ggtcagcaac

SEQ ID NO: 247 - DNA, 10 bp, Artificial Sequence
  Synthetic Polynucleotide
ccatcatggc

SEQ ID NO: 248 - DNA, 10 bp, Artificial Sequence
  Synthetic Polynucleotide
agcaaaagca

SEQ ID NO: 249 - DNA, 10 bp, Artificial Sequence
  Synthetic Polynucleotide
ccatcaggcc

SEQ ID NO: 250 - DNA, 10 bp, Artificial Sequence
  Synthetic Polynucleotide
tgcagagaca

SEQ ID NO: 251 - DNA, 10 bp, Artificial Sequence
  Synthetic Polynucleotide
tgggcttcca

SEQ ID NO: 252 - DNA, 10 bp, Artificial Sequence
  Synthetic Polynucleotide
ggatcagcca

SEQ ID NO: 253 - DNA, 10 bp, Artificial Sequence
  Synthetic Polynucleotide
gtgttcgcat

SEQ ID NO: 254 - DNA, 10 bp, Artificial Sequence
  Synthetic Polynucleotide
gtgcagaaca

SEQ ID NO: 255 - DNA, 10 bp, Artificial Sequence
  Synthetic Polynucleotide
tcctgaccaa

SEQ ID NO: 256 - DNA, 10 bp, Artificial Sequence
  Synthetic Polynucleotide
tgacggatgg

SEQ ID NO: 257 - DNA, 10 bp, Artificial Sequence
  Synthetic Polynucleotide
gaccatgcta

SEQ ID NO: 258 - DNA, 10 bp, Artificial Sequence
  Synthetic Polynucleotide
tccaaggaca

SEQ ID NO: 259 - DNA, 10 bp, Artificial Sequence
  Synthetic Polynucleotide
tcaacccaga

SEQ ID NO: 260 - DNA, 10 bp, Artificial Sequence
  Synthetic Polynucleotide
tggtgtttgg

SEQ ID NO: 261 - DNA, 10 bp, Artificial Sequence
  Synthetic Polynucleotide
gcacttgcat

SEQ ID NO: 262 - DNA, 10 bp, Artificial Sequence
  Synthetic Polynucleotide
tacgattggg

SEQ ID NO: 263 - DNA, 10 bp, Artificial Sequence
  Synthetic Polynucleotide
tctgtgagga

SEQ ID NO: 264 - DNA, 10 bp, Artificial Sequence
  Synthetic Polynucleotide
ggtccagcac

SEQ ID NO: 265 - DNA, 10 bp, Artificial Sequence
  Synthetic Polynucleotide
tctggatgct

SEQ ID NO: 266 - DNA, 10 bp, Artificial Sequence
  Synthetic Polynucleotide
ttccaggagc

SEQ ID NO: 267 - DNA, 10 bp, Artificial Sequence
  Synthetic Polynucleotide
tcctctcctc

SEQ ID NO: 268 - DNA, 10 bp, Artificial Sequence
  Synthetic Polynucleotide
gcagggacaa

SEQ ID NO: 269 - DNA, 10 bp, Artificial Sequence
  Synthetic Polynucleotide
gctggtccat

SEQ ID NO: 270 - DNA, 10 bp, Artificial Sequence
  Synthetic Polynucleotide
gacaatgcga

SEQ ID NO: 271 - DNA, 10 bp, Artificial Sequence
  Synthetic Polynucleotide
ccatcatggc

SEQ ID NO: 272 - DNA, 10 bp, Artificial Sequence
  Synthetic Polynucleotide
ccggcaattc

SEQ ID NO: 273 - DNA, 10 bp, Artificial Sequence
  Synthetic Polynucleotide
tggcatacgc

SEQ ID NO: 274 - DNA, 10 bp, Artificial Sequence
  Synthetic Polynucleotide
tgaatgcagg

SEQ ID NO: 275 - DNA, 10 bp, Artificial Sequence
  Synthetic Polynucleotide
ggcctgttgg

SEQ ID NO: 276 - DNA, 10 bp, Artificial Sequence
  Synthetic Polynucleotide
cgacgggaag

SEQ ID NO: 277 - DNA, 10 bp, Artificial Sequence
  Synthetic Polynucleotide
tcgccccatc

SEQ ID NO: 278 - DNA, 10 bp, Artificial Sequence
  Synthetic Polynucleotide
tggaagggct

SEQ ID NO: 279 - DNA, 17 bp, Artificial Sequence
  Synthetic Polynucleotide
catgagcctgttccata

SEQ ID NO: 280 - DNA, 17 bp, Artificial Sequence
  Synthetic Polynucleotide
agttatgtgtgctcagg

SEQ ID NO: 281 - DNA, 17 bp, Artificial Sequence
  Synthetic Polynucleotide
ccatcattggggcgtgg

SEQ ID NO: 282 - DNA, 17 bp, Artificial Sequence
  Synthetic Polynucleotide
tcctgttatcctgatgc

SEQ ID NO: 283 - DNA, 17 bp, Artificial Sequence
  Synthetic Polynucleotide
ctgctcccactagtcca

SEQ ID NO: 284 - DNA, 18 bp, Artificial Sequence
  Synthetic Polynucleotide
tgagatgatttgggatcc

SEQ ID NO: 285 - DNA, 17 bp, Artificial Sequence
  Synthetic Polynucleotide
ccatgcttttccatcgt

SEQ ID NO: 286 - DNA, 18 bp, Artificial Sequence
  Synthetic Polynucleotide
gaaccttatgtgtcatgc

SEQ ID NO: 287 - DNA, 18 bp, Artificial Sequence
  Synthetic Polynucleotide
gcccaccctttcactcct

SEQ ID NO: 288 - DNA, 17 bp, Artificial Sequence
  Synthetic Polynucleotide
accaaacaagtgtgcat

SEQ ID NO: 289 - DNA, 17 bp, Artificial Sequence
  Synthetic Polynucleotide
tcctatccaaacaccat

SEQ ID NO: 290 - DNA, 17 bp, Artificial Sequence
  Synthetic Polynucleotide
gcttggtcagcaagtgc

SEQ ID NO: 291 - DNA, 17 bp, Artificial Sequence
  Synthetic Polynucleotide
tccaattgtccctacat

SEQ ID NO: 292 - DNA, 18 bp, Artificial Sequence
  Synthetic Polynucleotide
tcacaaggacaatgcaat

SEQ ID NO: 293 - DNA, 17 bp, Artificial Sequence
  Synthetic Polynucleotide
gaccagtcggcaatctc

SEQ ID NO: 294 - DNA, 18 bp, Artificial Sequence
  Synthetic Polynucleotide
ggccatatagaagaatgc

SEQ ID NO: 295 - DNA, 18 bp, Artificial Sequence
  Synthetic Polynucleotide
gccatgagtttacttcac

SEQ ID NO: 296 - DNA, 18 bp, Artificial Sequence
  Synthetic Polynucleotide
tccgtagtaagtctgcta

SEQ ID NO: 297 - DNA, 18 bp, Artificial Sequence
  Synthetic Polynucleotide
ccaccctttcactcctgg

SEQ ID NO: 298 - DNA, 18 bp, Artificial Sequence
  Synthetic Polynucleotide
gtgttccgtttcatttgg

SEQ ID NO: 299 - DNA, 18 bp, Artificial Sequence
  Synthetic Polynucleotide
ggcaactcagcaccgtct

SEQ ID NO: 300 - DNA, 17 bp, Artificial Sequence
  Synthetic Polynucleotide
tggactagtgggagcag

SEQ ID NO: 301 - DNA, 17 bp, Artificial Sequence
  Synthetic Polynucleotide
tgcatttggcaccttta

SEQ ID NO: 302 - DNA, 17 bp, Artificial Sequence
  Synthetic Polynucleotide
gtgttcacagatgggtc

SEQ ID NO: 303 - DNA, 17 bp, Artificial Sequence
  Synthetic Polynucleotide
catgagcctgttccata

SEQ ID NO: 304 - DNA, 17 bp, Artificial Sequence
  Synthetic Polynucleotide
gctcagcatatagagga

SEQ ID NO: 305 - DNA, 17 bp, Artificial Sequence
  Synthetic Polynucleotide
cgatgtcaaagggaaga

SEQ ID NO: 306 - DNA, 18 bp, Artificial Sequence
  Synthetic Polynucleotide
attgaagagtgttcttgc

SEQ ID NO: 307 - DNA, 17 bp, Artificial Sequence
  Synthetic Polynucleotide
tacttgggcataaaccc

SEQ ID NO: 308 - DNA, 18 bp, Artificial Sequence
  Synthetic Polynucleotide
atgatgatgtctcttgga

SEQ ID NO: 309 - DNA, 18 bp, Artificial Sequence
  Synthetic Polynucleotide
gtagatgatttcagcacc

SEQ ID NO: 310 - DNA, 17 bp, Artificial Sequence
  Synthetic Polynucleotide
gactactgggcaaacaa

SEQ ID NO: 311 - DNA, 18 bp, Artificial Sequence
  Synthetic Polynucleotide
ccagaaattccgattgtt

SEQ ID NO: 312 - DNA, 17 bp, Artificial Sequence
  Synthetic Polynucleotide
gttctcacttggaatgc

SEQ ID NO: 313 - DNA, 17 bp, Artificial Sequence
  Synthetic Polynucleotide
gccatgagcctgttcca

SEQ ID NO: 314 - DNA, 17 bp, Artificial Sequence
  Synthetic Polynucleotide
ttctctgttgaaggcaa

SEQ ID NO: 315 - DNA, 17 bp, Artificial Sequence
  Synthetic Polynucleotide
cttggggaatcacatga

SEQ ID NO: 316 - DNA, 17 bp, Artificial Sequence
  Synthetic Polynucleotide
gcagggaaaatgacaga

SEQ ID NO: 317 - DNA, 17 bp, Artificial Sequence
  Synthetic Polynucleotide
gccagcacacaaatatc

SEQ ID NO: 318 - DNA, 17 bp, Artificial Sequence
  Synthetic Polynucleotide
ggatgacagttggagtc

SEQ ID NO: 319 - DNA, 17 bp, Artificial Sequence
  Synthetic Polynucleotide
ctcaccacatctgttgg

SEQ ID NO: 320 - DNA, 18 bp, Artificial Sequence
  Synthetic Polynucleotide
cattaggatcttcaccca

SEQ ID NO: 321 - DNA, 17 bp, Artificial Sequence
  Synthetic Polynucleotide
ttccagttgtctctgca

SEQ ID NO: 322 - DNA, 17 bp, Artificial Sequence
  Synthetic Polynucleotide
ggacaattcaattcggc

SEQ ID NO: 323 - DNA, 17 bp, Artificial Sequence
  Synthetic Polynucleotide
gtattggatttgtgccc

SEQ ID NO: 324 - DNA, 18 bp, Artificial Sequence
  Synthetic Polynucleotide
gcacaataagtcctcgtt

SEQ ID NO: 325 - DNA, 18 bp, Artificial Sequence
  Synthetic Polynucleotide
ttcaaaccctgatcttga

SEQ ID NO: 326 - DNA, 17 bp, Artificial Sequence
  Synthetic Polynucleotide
aatcatcatgcacttgc

SEQ ID NO: 327 - DNA, 17 bp, Artificial Sequence
  Synthetic Polynucleotide
tgcccattacttggtcc

SEQ ID NO: 328 - DNA, 17 bp, Artificial Sequence
  Synthetic Polynucleotide
tgctcccacttggaatg

SEQ ID NO: 329 - DNA, 17 bp, Artificial Sequence
  Synthetic Polynucleotide
ccgctgtaaccagacca

SEQ ID NO: 330 - DNA, 17 bp, Artificial Sequence
  Synthetic Polynucleotide
atgcgaacacaagagtc

SEQ ID NO: 331 - DNA, 18 bp, Artificial Sequence
  Synthetic Polynucleotide
tccttttacgccaggatc

SEQ ID NO: 332 - DNA, 17 bp, Artificial Sequence
  Synthetic Polynucleotide
cagcacttcatgccatg

SEQ ID NO: 333 - DNA, 17 bp, Artificial Sequence
  Synthetic Polynucleotide
taaaccgttgctgtagc

SEQ ID NO: 334 - DNA, 18 bp, Artificial Sequence
  Synthetic Polynucleotide
atatgtatcatgcgaccc

SEQ ID NO: 335 - DNA, 17 bp, Artificial Sequence
  Synthetic Polynucleotide
ccactgtaaccactcca

SEQ ID NO: 336 - DNA, 17 bp, Artificial Sequence
  Synthetic Polynucleotide
cctgtcctcacagacaa

SEQ ID NO: 337 - DNA, 17 bp, Artificial Sequence
  Synthetic Polynucleotide
gaaccgtgccaattatc

SEQ ID NO: 338 - DNA, 18 bp, Artificial Sequence
  Synthetic Polynucleotide
ggtggctgtactaaaata

SEQ ID NO: 339 - DNA, 17 bp, Artificial Sequence
  Synthetic Polynucleotide
ccccttatcaactccac

SEQ ID NO: 340 - DNA, 17 bp, Artificial Sequence
  Synthetic Polynucleotide
gtgtggatgggaagaac

SEQ ID NO: 341 - DNA, 17 bp, Artificial Sequence
  Synthetic Polynucleotide
ggacctcactggaaaca

SEQ ID NO: 342 - DNA, 17 bp, Artificial Sequence
  Synthetic Polynucleotide
tgtgtttgcagggacaa

SEQ ID NO: 343 - DNA, 18 bp, Artificial Sequence
  Synthetic Polynucleotide
cagccattgttttcaatg

SEQ ID NO: 344 - DNA, 17 bp, Artificial Sequence
  Synthetic Polynucleotide
cagaatgatgtgtggct

SEQ ID NO: 345 - DNA, 18 bp, Artificial Sequence
  Synthetic Polynucleotide
gtatcctgaccaatcagt

SEQ ID NO: 346 - DNA, 17 bp, Artificial Sequence
  Synthetic Polynucleotide
gaggaatgctcctgtta

SEQ ID NO: 347 - DNA, 17 bp, Artificial Sequence
  Synthetic Polynucleotide
agactcttgtgttcgca

SEQ ID NO: 348 - DNA, 17 bp, Artificial Sequence
  Synthetic Polynucleotide
tgcagcgatggacccgg

SEQ ID NO: 349 - DNA, 18 bp, Artificial Sequence
  Synthetic Polynucleotide
tactctattttagcccca

SEQ ID NO: 350 - DNA, 18 bp, Artificial Sequence
  Synthetic Polynucleotide
aggacaataagcacagct

SEQ ID NO: 351 - DNA, 18 bp, Artificial Sequence
  Synthetic Polynucleotide
cctccctcgtataagttc

SEQ ID NO: 352 - DNA, 17 bp, Artificial Sequence
  Synthetic Polynucleotide
tcctgttatgtggacac

SEQ ID NO: 353 - DNA, 18 bp, Artificial Sequence
  Synthetic Polynucleotide
gtgccatgagtttacttc

SEQ ID NO: 354 - DNA, 18 bp, Artificial Sequence
  Synthetic Polynucleotide
ggaatgacactatcggta

SEQ ID NO: 355 - DNA, 18 bp, Artificial Sequence
  Synthetic Polynucleotide
catcagggaaagatccag

SEQ ID NO: 356 - DNA, 18 bp, Artificial Sequence
  Synthetic Polynucleotide
cactaaaaggttcagcca

SEQ ID NO: 357 - DNA, 17 bp, Artificial Sequence
  Synthetic Polynucleotide
tcctgaccaatcagtta

SEQ ID NO: 358 - DNA, 18 bp, Artificial Sequence
  Synthetic Polynucleotide
tgaatgcccctaattacc

SEQ ID NO: 359 - DNA, 17 bp, Artificial Sequence
  Synthetic Polynucleotide
gatgcaaacgcattctg

SEQ ID NO: 360 - DNA, 17 bp, Artificial Sequence
  Synthetic Polynucleotide
cgtttcatttgggaacc

SEQ ID NO: 361 - DNA, 17 bp, Artificial Sequence
  Synthetic Polynucleotide
tcccgatccaggttcat

SEQ ID NO: 362 - DNA, 18 bp, Artificial Sequence
  Synthetic Polynucleotide
tcatcaaagtcacagagg

SEQ ID NO: 363 - DNA, 18 bp, Artificial Sequence
  Synthetic Polynucleotide
agggcaattagactgtta

SEQ ID NO: 364 - DNA, 17 bp, Artificial Sequence
  Synthetic Polynucleotide
tcacaagggattagtga

SEQ ID NO: 365 - DNA, 18 bp, Artificial Sequence
  Synthetic Polynucleotide
ctactccacacatcacaa

SEQ ID NO: 366 - DNA, 18 bp, Artificial Sequence
  Synthetic Polynucleotide
aataattgggcaaactga

SEQ ID NO: 367 - DNA, 18 bp, Artificial Sequence
  Synthetic Polynucleotide
gttgattctcatccaagg

SEQ ID NO: 368 - DNA, 18 bp, Artificial Sequence
  Synthetic Polynucleotide
tagtgcagatcacagggt

SEQ ID NO: 369 - DNA, 17 bp, Artificial Sequence
  Synthetic Polynucleotide
ttcaccaataggacagc

SEQ ID NO: 370 - DNA, 17 bp, Artificial Sequence
  Synthetic Polynucleotide
cctgctgaatgacaaac

SEQ ID NO: 371 - DNA, 18 bp, Artificial Sequence
  Synthetic Polynucleotide
tgagcattcttcaatgtg

SEQ ID NO: 372 - DNA, 17 bp, Artificial Sequence
  Synthetic Polynucleotide
tgctctaagtcaaggca

SEQ ID NO: 373 - DNA, 17 bp, Artificial Sequence
  Synthetic Polynucleotide
ttcatcaaaagggtccg

SEQ ID NO: 374 - DNA, 17 bp, Artificial Sequence
  Synthetic Polynucleotide
tcaaagccgcagtgtca

SEQ ID NO: 375 - DNA, 18 bp, Artificial Sequence
  Synthetic Polynucleotide
ccacaaaacacaacaata

SEQ ID NO: 376 - DNA, 18 bp, Artificial Sequence
  Synthetic Polynucleotide
ggcaagtcatagttgaca

SEQ ID NO: 377 - DNA, 17 bp, Artificial Sequence
  Synthetic Polynucleotide
cttgtactcgaccaccc

SEQ ID NO: 378 - DNA, 18 bp, Artificial Sequence
  Synthetic Polynucleotide
ggggtcaaacaagagaac

SEQ ID NO: 379 - DNA, 17 bp, Artificial Sequence
  Synthetic Polynucleotide
tcgatgtcaaagggaag

SEQ ID NO: 380 - DNA, 17 bp, Artificial Sequence
  Synthetic Polynucleotide
gtagctccacggtattt

SEQ ID NO: 381 - DNA, 17 bp, Artificial Sequence
  Synthetic Polynucleotide
ggtcattaggccgactt

SEQ ID NO: 382 - DNA, 18 bp, Artificial Sequence
  Synthetic Polynucleotide
ataagttgggaaatgggg

SEQ ID NO: 383 - DNA, 18 bp, Artificial Sequence
  Synthetic Polynucleotide
ctcaaaaccactcctgga

SEQ ID NO: 384 - DNA, 18 bp, Artificial Sequence
  Synthetic Polynucleotide
catttgtgtgcagggaaa

SEQ ID NO: 385 - DNA, 18 bp, Artificial Sequence
  Synthetic Polynucleotide
ggttttctccttaggctg

SEQ ID NO: 386 - DNA, 18 bp, Artificial Sequence
  Synthetic Polynucleotide
tgaagagtgttcctgtta

SEQ ID NO: 387 - DNA, 17 bp, Artificial Sequence
  Synthetic Polynucleotide
aatcctcgctgatcgtt

SEQ ID NO: 388 - DNA, 18 bp, Artificial Sequence
  Synthetic Polynucleotide
acaaggcaagtgtgtata

SEQ ID NO: 389 - DNA, 17 bp, Artificial Sequence
  Synthetic Polynucleotide
gccagtctcagagcatt

SEQ ID NO: 390 - DNA, 18 bp, Artificial Sequence
  Synthetic Polynucleotide
tggtaaagttgaggacaa

SEQ ID NO: 391 - DNA, 17 bp, Artificial Sequence
  Synthetic Polynucleotide
cttttggttctcccgat

SEQ ID NO: 392 - DNA, 17 bp, Artificial Sequence
  Synthetic Polynucleotide
gcagggataattggcat

SEQ ID NO: 393 - DNA, 17 bp, Artificial Sequence
  Synthetic Polynucleotide
tttgctttctcctccat

SEQ ID NO: 394 - DNA, 18 bp, Artificial Sequence
  Synthetic Polynucleotide
attgcagtactcatagga

SEQ ID NO: 395 - DNA, 18 bp, Artificial Sequence
  Synthetic Polynucleotide
ggttcgactaattgttcg

SEQ ID NO: 396 - DNA, 18 bp, Artificial Sequence
  Synthetic Polynucleotide
gtcgttaattcctgggta

SEQ ID NO: 397 - DNA, 17 bp, Artificial Sequence
  Synthetic Polynucleotide
tgtcatgtatggtccca

SEQ ID NO: 398 - DNA, 18 bp, Artificial Sequence
  Synthetic Polynucleotide
tactagtcacaagggaac

SEQ ID NO: 399 - DNA, 10 bp, Artificial Sequence
  Synthetic Polynucleotide
ctgccatctg

SEQ ID NO: 400 - DNA, 10 bp, Artificial Sequence
  Synthetic Polynucleotide
ggggattggg

SEQ ID NO: 401 - DNA, 10 bp, Artificial Sequence
  Synthetic Polynucleotide
tgcttgccca

SEQ ID NO: 402 - DNA, 10 bp, Artificial Sequence
  Synthetic Polynucleotide
gcgagagcgt

SEQ ID NO: 403 - DNA, 10 bp, Artificial Sequence
  Synthetic Polynucleotide
ggcttgccaa

SEQ ID NO: 404 - DNA, 10 bp, Artificial Sequence
  Synthetic Polynucleotide
tggggtatga

SEQ ID NO: 405 - DNA, 16 bp, Artificial Sequence
  Synthetic Polynucleotide
tgccatctgtttccat

SEQ ID NO: 406 - DNA, 17 bp, Artificial Sequence
  Synthetic Polynucleotide
tggaaaggtgaaggggc

SEQ ID NO: 407 - DNA, 17 bp, Artificial Sequence
  Synthetic Polynucleotide
tagcctccgctagtcaa

SEQ ID NO: 408 - DNA, 17 bp, Artificial Sequence
  Synthetic Polynucleotide
acgcaggactcggcttg

SEQ ID NO: 409 - DNA, 17 bp, Artificial Sequence
  Synthetic Polynucleotide
tgctgttgcactatacc

SEQ ID NO: 410 - DNA, 17 bp, Artificial Sequence
  Synthetic Polynucleotide
gcagcaggaagcactat

SEQ ID NO: 411 - DNA, 17 bp, Artificial Sequence
  Synthetic Polynucleotide
agaggggttgatatccc

SEQ ID NO: 412 - DNA, 18 bp, Artificial Sequence
  Synthetic Polynucleotide
aggtagcactatgggcgc

SEQ ID NO: 413 - DNA, 18 bp, Artificial Sequence
  Synthetic Polynucleotide
ttgtatggattttcaggc

SEQ ID NO: 414 - DNA, 17 bp, Artificial Sequence
  Synthetic Polynucleotide
ttcttcagagcagacca

SEQ ID NO: 415 - DNA, 17 bp, Artificial Sequence
  Synthetic Polynucleotide
ggagctgtttaatgccc

SEQ ID NO: 416 - DNA, 17 bp, Artificial Sequence
  Synthetic Polynucleotide
aacgctgacggtacagg

SEQ ID NO: 417 - DNA, 17 bp, Artificial Sequence
  Synthetic Polynucleotide
cagatcctccttgagcc

SEQ ID NO: 418 - DNA, 18 bp, Artificial Sequence
  Synthetic Polynucleotide
caggagcagaaactttct

SEQ ID NO: 419 - DNA, 18 bp, Artificial Sequence
  Synthetic Polynucleotide
gggtaattttgacctgtc

SEQ ID NO: 420 - DNA, 18 bp, Artificial Sequence
  Synthetic Polynucleotide
ggaagaaaacctccgacg

SEQ ID NO: 421 - DNA, 10 bp, Artificial Sequence
  Synthetic Polynucleotide
cgttcaccca

SEQ ID NO: 422 - DNA, 10 bp, Artificial Sequence
  Synthetic Polynucleotide
acgccgtggg

SEQ ID NO: 423 - DNA, 10 bp, Artificial Sequence
  Synthetic Polynucleotide
atgcggtctt

SEQ ID NO: 424 - DNA, 10 bp, Artificial Sequence
  Synthetic Polynucleotide
gaacacgctg

SEQ ID NO: 425 - DNA, 17 bp, Artificial Sequence
  Synthetic Polynucleotide
cgcaggtaaagtgatct

SEQ ID NO: 426 - DNA, 17 bp, Artificial Sequence
  Synthetic Polynucleotide
ctctcctttgcacgccg

SEQ ID NO: 427 - DNA, 17 bp, Artificial Sequence
  Synthetic Polynucleotide
ttcaggcatagaagctt

SEQ ID NO: 428 - DNA, 17 bp, Artificial Sequence
  Synthetic Polynucleotide
aggatgcccttcaggta

SEQ ID NO: 429 - DNA, 18 bp, Artificial Sequence
  Synthetic Polynucleotide
cacgtactttctccatcg

SEQ ID NO: 430 - DNA, 18 bp, Artificial Sequence
  Synthetic Polynucleotide
gtcatcttctccaaacac

SEQ ID NO: 431 - DNA, 10 bp, Artificial Sequence
  Synthetic Polynucleotide
aatccagggg

SEQ ID NO: 432 - DNA, 10 bp, Artificial Sequence
  Synthetic Polynucleotide
ggagggcgat

SEQ ID NO: 433 - DNA, 10 bp, Artificial Sequence
  Synthetic Polynucleotide
acgaggccgg

SEQ ID NO: 434 - DNA, 10 bp, Artificial Sequence
  Synthetic Polynucleotide
ccttagacgc

SEQ ID NO: 435 - DNA, 10 bp, Artificial Sequence
  Synthetic Polynucleotide
atgttccgct

SEQ ID NO: 436 - DNA, 10 bp, Artificial Sequence
  Synthetic Polynucleotide
acgaggaagt

SEQ ID NO: 437 - DNA, 10 bp, Artificial Sequence
  Synthetic Polynucleotide
tgtgggacga

SEQ ID NO: 438 - DNA, 17 bp, Artificial Sequence
  Synthetic Polynucleotide
tccgtcacttgaagatt

SEQ ID NO: 439 - DNA, 17 bp, Artificial Sequence
  Synthetic Polynucleotide
tgaatgaagatggcgtc

SEQ ID NO: 440 - DNA, 17 bp, Artificial Sequence
  Synthetic Polynucleotide
tatggagcagacagtgc

SEQ ID NO: 441 - DNA, 18 bp, Artificial Sequence
  Synthetic Polynucleotide
ttctgtgaagaggaagag

SEQ ID NO: 442 - DNA, 18 bp, Artificial Sequence
  Synthetic Polynucleotide
taatccagggatcaatta

SEQ ID NO: 443 - DNA, 17 bp, Artificial Sequence
  Synthetic Polynucleotide
aagatggcgtcgaatga

SEQ ID NO: 444 - DNA, 18 bp, Artificial Sequence
  Synthetic Polynucleotide
agtcctaacatcagcaat

SEQ ID NO: 445 - DNA, 18 bp, Artificial Sequence
  Synthetic Polynucleotide
gtaaatgatgatggcgtc

SEQ ID NO: 446 - DNA, 18 bp, Artificial Sequence
  Synthetic Polynucleotide
tcaacaggttctggggcg

SEQ ID NO: 447 - DNA, 18 bp, Artificial Sequence
  Synthetic Polynucleotide
gtataatggatggaccgg

SEQ ID NO: 448 - DNA, 18 bp, Artificial Sequence
  Synthetic Polynucleotide
cttggtgtagcgtcctta

SEQ ID NO: 449 - DNA, 17 bp, Artificial Sequence
  Synthetic Polynucleotide
agagtatggtcttcggc

SEQ ID NO: 450 - DNA, 18 bp, Artificial Sequence
  Synthetic Polynucleotide
tctagcaaaatctcacct

SEQ ID NO: 451 - DNA, 18 bp, Artificial Sequence
  Synthetic Polynucleotide
tgtgaatgaagatggcgt

SEQ ID NO: 452 - DNA, 18 bp, Artificial Sequence
  Synthetic Polynucleotide
ttcacaaaactgggagcc

SEQ ID NO: 453 - DNA, 17 bp, Artificial Sequence
  Synthetic Polynucleotide
atggacttttacgtgcc

SEQ ID NO: 454 - DNA, 17 bp, Artificial Sequence
  Synthetic Polynucleotide
tttgcgaatagaggcaa

SEQ ID NO: 455 - DNA, 17 bp, Artificial Sequence
  Synthetic Polynucleotide
ccagctcagccaaaaca

SEQ ID NO: 456 - DNA, 18 bp, Artificial Sequence
  Synthetic Polynucleotide
agctatggggaaatcaga

SEQ ID NO: 457 - DNA, 18 bp, Artificial Sequence
  Synthetic Polynucleotide
tcaaattctagggttccc

SEQ ID NO: 458 - DNA, 17 bp, Artificial Sequence
  Synthetic Polynucleotide
cactgcaaagacccatt

SEQ ID NO: 459 - DNA, 17 bp, Artificial Sequence
  Synthetic Polynucleotide
agcacacaaaatgccat

SEQ ID NO: 460 - DNA, 17 bp, Artificial Sequence
  Synthetic Polynucleotide
tctgcattctggtagag

SEQ ID NO: 461 - DNA, 18 bp, Artificial Sequence
  Synthetic Polynucleotide
tgttacccaggagatttc

SEQ ID NO: 462 - DNA, 17 bp, Artificial Sequence
  Synthetic Polynucleotide
tgcaatgacccattaga

SEQ ID NO: 463 - DNA, 17 bp, Artificial Sequence
  Synthetic Polynucleotide
tccacagtcgccagttc

SEQ ID NO: 464 - DNA, 18 bp, Artificial Sequence
  Synthetic Polynucleotide
tcctttcattttccagta

SEQ ID NO: 465 - DNA, 18 bp, Artificial Sequence
  Synthetic Polynucleotide
ggttacaggactaaggaa

SEQ ID NO: 466 - DNA, 17 bp, Artificial Sequence
  Synthetic Polynucleotide
ccaaacagacctctaga

SEQ ID NO: 467 - DNA, 17 bp, Artificial Sequence
  Synthetic Polynucleotide
catgcccttatgctgga

SEQ ID NO: 468 - DNA, 18 bp, Artificial Sequence
  Synthetic Polynucleotide
gcagagtttcccattatg

SEQ ID NO: 469 - DNA, 18 bp, Artificial Sequence
  Synthetic Polynucleotide
ctgtactgaaagctgaca

SEQ ID NO: 470 - DNA, 18 bp, Artificial Sequence
  Synthetic Polynucleotide
acccattagaacacatcc

SEQ ID NO: 471 - DNA, 18 bp, Artificial Sequence
  Synthetic Polynucleotide
tagatggatggtatggtt

SEQ ID NO: 472 - DNA, 18 bp, Artificial Sequence
  Synthetic Polynucleotide
ggacattctccaattgtg

SEQ ID NO: 473 - DNA, 17 bp, Artificial Sequence
  Synthetic Polynucleotide
gttcatggcccaatcat

SEQ ID NO: 474 - DNA, 17 bp, Artificial Sequence
  Synthetic Polynucleotide
aagcacttctttccctt

SEQ ID NO: 475 - DNA, 18 bp, Artificial Sequence
  Synthetic Polynucleotide
ctgcactgaaagctgaca

SEQ ID NO: 476 - DNA, 17 bp, Artificial Sequence
  Synthetic Polynucleotide
tgttagtgatcccgtca

SEQ ID NO: 477 - DNA, 18 bp, Artificial Sequence
  Synthetic Polynucleotide
tactgaccaacaaagtct

SEQ ID NO: 478 - DNA, 18 bp, Artificial Sequence
  Synthetic Polynucleotide
catccagaaactgattgc

SEQ ID NO: 479 - DNA, 18 bp, Artificial Sequence
  Synthetic Polynucleotide
gcgtgaagaacggcacat

SEQ ID NO: 480 - DNA, 18 bp, Artificial Sequence
  Synthetic Polynucleotide
cattctccctgcttggtc

SEQ ID NO: 481 - DNA, 18 bp, Artificial Sequence
  Synthetic Polynucleotide
gactcgaacagaggtgtg

SEQ ID NO: 482 - DNA, 17 bp, Artificial Sequence
  Synthetic Polynucleotide
tcatgattgccagtgac

SEQ ID NO: 483 - DNA, 17 bp, Artificial Sequence
  Synthetic Polynucleotide
tatgcagcagacaaaga

SEQ ID NO: 484 - DNA, 18 bp, Artificial Sequence
  Synthetic Polynucleotide
caaccattccttgccatc

SEQ ID NO: 485 - DNA, 18 bp, Artificial Sequence
  Synthetic Polynucleotide
tcattcttcaggaacatg

SEQ ID NO: 486 - DNA, 18 bp, Artificial Sequence
  Synthetic Polynucleotide
ccagaaagaaatcccagc

SEQ ID NO: 487 - DNA, 18 bp, Artificial Sequence
  Synthetic Polynucleotide
ggacatataatgccgaac

SEQ ID NO: 488 - DNA, 18 bp, Artificial Sequence
  Synthetic Polynucleotide
tattgccccaaacaatcc

SEQ ID NO: 489 - DNA, 18 bp, Artificial Sequence
  Synthetic Polynucleotide
ccgattgccaaaggatca

SEQ ID NO: 490 - DNA, 17 bp, Artificial Sequence
  Synthetic Polynucleotide
gcaaatgttgcacctaa

SEQ ID NO: 491 - DNA, 17 bp, Artificial Sequence
  Synthetic Polynucleotide
tggatttcctttgccat

SEQ ID NO: 492 - DNA, 17 bp, Artificial Sequence
  Synthetic Polynucleotide
tcctcagcattttccct

SEQ ID NO: 493 - DNA, 17 bp, Artificial Sequence
  Synthetic Polynucleotide
tggtacggtttcaggca

SEQ ID NO: 494 - DNA, 18 bp, Artificial Sequence
  Synthetic Polynucleotide
ccaattcagtcggctaaa

SEQ ID NO: 495 - DNA, 18 bp, Artificial Sequence
  Synthetic Polynucleotide
accatgcagtagcaaatg

SEQ ID NO: 496 - DNA, 18 bp, Artificial Sequence
  Synthetic Polynucleotide
gttgcacttaatgttgcc

SEQ ID NO: 497 - DNA, 17 bp, Artificial Sequence
  Synthetic Polynucleotide
cgcatccctgttgccaa

SEQ ID NO: 498 - DNA, 18 bp, Artificial Sequence
  Synthetic Polynucleotide
tatgttcaagcatcaggg

SEQ ID NO: 499 - DNA, 18 bp, Artificial Sequence
  Synthetic Polynucleotide
tgttgcatattttccctg

SEQ ID NO: 500 - DNA, 18 bp, Artificial Sequence
  Synthetic Polynucleotide
gggacaatagtgaagaca

SEQ ID NO: 501 - DNA, 18 bp, Artificial Sequence
  Synthetic Polynucleotide
ccttttcgatttgatgga

SEQ ID NO: 502 - DNA, 18 bp, Artificial Sequence
  Synthetic Polynucleotide
gtcacagtctctaccagg

SEQ ID NO: 503 - DNA, 17 bp, Artificial Sequence
  Synthetic Polynucleotide
caggcccacataatgaa

SEQ ID NO: 504 - DNA, 17 bp, Artificial Sequence
  Synthetic Polynucleotide
gagttctcagaagtgga

SEQ ID NO: 505 - DNA, 17 bp, Artificial Sequence
  Synthetic Polynucleotide
agccatccagctacact

SEQ ID NO: 506 - DNA, 17 bp, Artificial Sequence
  Synthetic Polynucleotide
ggttaccatgcaaacaa

SEQ ID NO: 507 - DNA, 17 bp, Artificial Sequence
  Synthetic Polynucleotide
catgattgccagtgcta

SEQ ID NO: 508 - DNA, 17 bp, Artificial Sequence
  Synthetic Polynucleotide
catagcaatgagcaggg

SEQ ID NO: 509 - DNA, 17 bp, Artificial Sequence
  Synthetic Polynucleotide
tagaactcgaaacaacc

SEQ ID NO: 510 - DNA, 18 bp, Artificial Sequence
  Synthetic Polynucleotide
tgaacttctggttctcat

SEQ ID NO: 511 - DNA, 18 bp, Artificial Sequence
  Synthetic Polynucleotide
gcttcgaattgagtgttc

SEQ ID NO: 512 - DNA, 18 bp, Artificial Sequence
  Synthetic Polynucleotide
ggattcatagaaggagga

SEQ ID NO: 513 - DNA, 18 bp, Artificial Sequence
  Synthetic Polynucleotide
gttcagtgttgatgttcc

SEQ ID NO: 514 - DNA, 18 bp, Artificial Sequence
  Synthetic Polynucleotide
tacccaacaataaagagg

SEQ ID NO: 515 - DNA, 17 bp, Artificial Sequence
  Synthetic Polynucleotide
gctagggaactcgccac

SEQ ID NO: 516 - DNA, 17 bp, Artificial Sequence
  Synthetic Polynucleotide
cagggaagtggatatgc

SEQ ID NO: 517 - DNA, 17 bp, Artificial Sequence
  Synthetic Polynucleotide
ccgttgtgtgtcttttc

SEQ ID NO: 518 - DNA, 18 bp, Artificial Sequence
  Synthetic Polynucleotide
tgcaatagtcagtcttgt

SEQ ID NO: 519 - DNA, 18 bp, Artificial Sequence
  Synthetic Polynucleotide
gttcagccttgattcttc

SEQ ID NO: 520 - DNA, 17 bp, Artificial Sequence
  Synthetic Polynucleotide
agaacttctggtgctta

SEQ ID NO: 521 - DNA, 17 bp, Artificial Sequence
  Synthetic Polynucleotide
tgcaccgcatgtttcca

SEQ ID NO: 522 - DNA, 17 bp, Artificial Sequence
  Synthetic Polynucleotide
tggtttagcttcggggc

SEQ ID NO: 523 - DNA, 18 bp, Artificial Sequence
  Synthetic Polynucleotide
cattgcttcttctctgta

SEQ ID NO: 524 - DNA, 17 bp, Artificial Sequence
  Synthetic Polynucleotide
tggaccagagactccat

SEQ ID NO: 525 - DNA, 18 bp, Artificial Sequence
  Synthetic Polynucleotide
tctgtggcattcactact

SEQ ID NO: 526 - DNA, 18 bp, Artificial Sequence
  Synthetic Polynucleotide
aaatatgtcttgggcacc

SEQ ID NO: 527 - DNA, 18 bp, Artificial Sequence
  Synthetic Polynucleotide
tatcacatctttgtagcc

SEQ ID NO: 528 - DNA, 17 bp, Artificial Sequence
  Synthetic Polynucleotide
tacaaaagcacccaatc

SEQ ID NO: 529 - DNA, 17 bp, Artificial Sequence
  Synthetic Polynucleotide
tgggagggcgatcgcaa

SEQ ID NO: 530 - DNA, 17 bp, Artificial Sequence
  Synthetic Polynucleotide
tggacaggagatcgcaa

SEQ ID NO: 531 - DNA, 17 bp, Artificial Sequence
  Synthetic Polynucleotide
tgggaaggtagtcgcga

SEQ ID NO: 532 - DNA, 17 bp, Artificial Sequence
  Synthetic Polynucleotide
tggacaggagatcgcga

SEQ ID NO: 533 - DNA, 17 bp, Artificial Sequence
  Synthetic Polynucleotide
gtaatgctttcacggct

SEQ ID NO: 534 - DNA, 17 bp, Artificial Sequence
  Synthetic Polynucleotide
gcaacgccttctcggcg

SEQ ID NO: 535 - DNA, 17 bp, Artificial Sequence
  Synthetic Polynucleotide
ggaatgcttttacagct

SEQ ID NO: 536 - DNA, 17 bp, Artificial Sequence
  Synthetic Polynucleotide
gtaacgcatttaccgcc

SEQ ID NO: 537 - DNA, 17 bp, Artificial Sequence
  Synthetic Polynucleotide
ggaatgcgttcacwgck

SEQ ID NO: 538 - DNA, 17 bp, Artificial Sequence
  Synthetic Polynucleotide
gaaatgcgtttacrgca

SEQ ID NO: 539 - DNA, 17 bp, Artificial Sequence
  Synthetic Polynucleotide
gtaatgcctttactgcg

SEQ ID NO: 540 - DNA, 17 bp, Artificial Sequence
  Synthetic Polynucleotide
gaagtgcgtttacagcg

SEQ ID NO: 541 - DNA, 17 bp, Artificial Sequence
  Synthetic Polynucleotide
gcaatgccttcacmgct

SEQ ID NO: 542 - DNA, 17 bp, Artificial Sequence
  Synthetic Polynucleotide
ggaacgccttttcagca

SEQ ID NO: 543 - DNA, 17 bp, Artificial Sequence
  Synthetic Polynucleotide
gtaatgccttcacagcg

SEQ ID NO: 544 - DNA, 17 bp, Artificial Sequence
  Synthetic Polynucleotide
ggaacgcgttcacmgcy

SEQ ID NO: 545 - DNA, 17 bp, Artificial Sequence
  Synthetic Polynucleotide
ggaatgcgttcaccgcc

SEQ ID NO: 546 - DNA, 17 bp, Artificial Sequence
  Synthetic Polynucleotide
ggaatgctttcaccgct

SEQ ID NO: 547 - DNA, 17 bp, Artificial Sequence
  Synthetic Polynucleotide
cctttgcacgccatggg

SEQ ID NO: 548 - DNA, 17 bp, Artificial Sequence
  Synthetic Polynucleotide
ccttygcacgccgtggg

SEQ ID NO: 549 - DNA, 17 bp, Artificial Sequence
  Synthetic Polynucleotide
tgggcgaacgccgtgtg

SEQ ID NO: 550 - DNA, 17 bp, Artificial Sequence
  Synthetic Polynucleotide
tgggtggacgccgtgtg

SEQ ID NO: 551 - DNA, 17 bp, Artificial Sequence
  Synthetic Polynucleotide
tgggtgaacgcbgtgtg

SEQ ID NO: 552 - DNA, 17 bp, Artificial Sequence
  Synthetic Polynucleotide
tggctgaacgccgtgtg

SEQ ID NO: 553 - DNA, 18 bp, Artificial Sequence
  Synthetic Polynucleotide
gaaarggggcgytagggt

SEQ ID NO: 554 - DNA, 18 bp, Artificial Sequence
  Synthetic Polynucleotide
cccacttgcgrcacacrc

SEQ ID NO: 555 - DNA, 18 bp, Artificial Sequence
  Synthetic Polynucleotide
cgacgcttccgytgccgy

SEQ ID NO: 556 - DNA, 18 bp, Artificial Sequence
  Synthetic Polynucleotide
yaaaacctgaggacctgw

SEQ ID NO: 557 - DNA, 18 bp, Artificial Sequence
  Synthetic Polynucleotide
tgatgatggcgtcdaaag

SEQ ID NO: 558 - DNA, 18 bp, Artificial Sequence
  Synthetic Polynucleotide
tatgwctatcyaacggag

SEQ ID NO: 559 - DNA, 10 bp, Artificial Sequence
  Synthetic Polynucleotide
ttgtctggca

SEQ ID NO: 560 - DNA, 10 bp, Artificial Sequence
  Synthetic Polynucleotide
tggaaaagcc

SEQ ID NO: 561 - DNA, 10 bp, Artificial Sequence
  Synthetic Polynucleotide
agtcagccct

SEQ ID NO: 562 - DNA, 10 bp, Artificial Sequence
  Synthetic Polynucleotide
cttggacagc

SEQ ID NO: 563 - DNA, 10 bp, Artificial Sequence
  Synthetic Polynucleotide
tcagttggca

SEQ ID NO: 564 - DNA, 10 bp, Artificial Sequence
  Synthetic Polynucleotide
agaatggcgt

SEQ ID NO: 565 - DNA, 10 bp, Artificial Sequence
  Synthetic Polynucleotide
gcattttgcc

SEQ ID NO: 566 - DNA, 10 bp, Artificial Sequence
  Synthetic Polynucleotide
acaaagcagc

SEQ ID NO: 567 - DNA, 10 bp, Artificial Sequence
  Synthetic Polynucleotide
ctgtgaggcg

SEQ ID NO: 568 - DNA, 10 bp, Artificial Sequence
  Synthetic Polynucleotide
gagggaacca

SEQ ID NO: 569 - DNA, 10 bp, Artificial Sequence
  Synthetic Polynucleotide
ttgaggggcc

SEQ ID NO: 570 - DNA, 10 bp, Artificial Sequence
  Synthetic Polynucleotide
gtgcattggt

SEQ ID NO: 571 - DNA, 10 bp, Artificial Sequence
  Synthetic Polynucleotide
ggctgtgttt

SEQ ID NO: 572 - DNA, 10 bp, Artificial Sequence
  Synthetic Polynucleotide
ccctccaact

SEQ ID NO: 573 - DNA, 10 bp, Artificial Sequence
  Synthetic Polynucleotide
gcacagtgga

SEQ ID NO: 574 - DNA, 10 bp, Artificial Sequence
  Synthetic Polynucleotide
tgaagctggg

SEQ ID NO: 575 - DNA, 10 bp, Artificial Sequence
  Synthetic Polynucleotide
acttgccaag

SEQ ID NO: 576 - DNA, 10 bp, Artificial Sequence
  Synthetic Polynucleotide
ccgtgaccca

SEQ ID NO: 577 - DNA, 10 bp, Artificial Sequence
  Synthetic Polynucleotide
tggggttgtg

SEQ ID NO: 578 - DNA, 10 bp, Artificial Sequence
  Synthetic Polynucleotide
agctgctttg

SEQ ID NO: 579 - DNA, 10 bp, Artificial Sequence
  Synthetic Polynucleotide
tctaccgtca

SEQ ID NO: 580 - DNA, 10 bp, Artificial Sequence
  Synthetic Polynucleotide
ggctcaaggg

SEQ ID NO: 581 - DNA, 10 bp, Artificial Sequence
  Synthetic Polynucleotide
gctgctggtt

SEQ ID NO: 582 - DNA, 10 bp, Artificial Sequence
  Synthetic Polynucleotide
aagtgtggga

SEQ ID NO: 583 - DNA, 10 bp, Artificial Sequence
  Synthetic Polynucleotide
gctttgcccg

SEQ ID NO: 584 - DNA, 10 bp, Artificial Sequence
  Synthetic Polynucleotide
aagcaacagc

SEQ ID NO: 585 - DNA, 10 bp, Artificial Sequence
  Synthetic Polynucleotide
tccaggcact

SEQ ID NO: 586 - DNA, 10 bp, Artificial Sequence
  Synthetic Polynucleotide
acgctttcct

SEQ ID NO: 587 - DNA, 10 bp, Artificial Sequence
  Synthetic Polynucleotide
accatctgga

SEQ ID NO: 588 - DNA, 10 bp, Artificial Sequence
  Synthetic Polynucleotide
tctggtccaa

SEQ ID NO: 589 - DNA, 10 bp, Artificial Sequence
  Synthetic Polynucleotide
tagcaacagc

SEQ ID NO: 590 - DNA, 10 bp, Artificial Sequence
  Synthetic Polynucleotide
atgaccgcaa

SEQ ID NO: 591 - DNA, 10 bp, Artificial Sequence
  Synthetic Polynucleotide
aagggtggcg

SEQ ID NO: 592 - DNA, 10 bp, Artificial Sequence
  Synthetic Polynucleotide
gtggtgacgg

SEQ ID NO: 593 - DNA, 10 bp, Artificial Sequence
  Synthetic Polynucleotide
atcccgcagg

SEQ ID NO: 594 - DNA, 10 bp, Artificial Sequence
  Synthetic Polynucleotide
ggcgatggag

SEQ ID NO: 595 - DNA, 10 bp, Artificial Sequence
  Synthetic Polynucleotide
caccgtgtca

SEQ ID NO: 596 - DNA, 10 bp, Artificial Sequence
  Synthetic Polynucleotide
cacaatgcga

SEQ ID NO: 597 - DNA, 10 bp, Artificial Sequence
  Synthetic Polynucleotide
ttgttgcgac

SEQ ID NO: 598 - DNA, 10 bp, Artificial Sequence
  Synthetic Polynucleotide
cgtcatcgag

SEQ ID NO: 599 - DNA, 10 bp, Artificial Sequence
  Synthetic Polynucleotide
tccattgcag

SEQ ID NO: 600 - DNA, 10 bp, Artificial Sequence
  Synthetic Polynucleotide
atgagctgca

SEQ ID NO: 601 - DNA, 10 bp, Artificial Sequence
  Synthetic Polynucleotide
cccctccaaa

SEQ ID NO: 602 - DNA, 10 bp, Artificial Sequence
  Synthetic Polynucleotide
ttggcatgtg

SEQ ID NO: 603 - DNA, 10 bp, Artificial Sequence
  Synthetic Polynucleotide
tccagtccac

SEQ ID NO: 604 - DNA, 10 bp, Artificial Sequence
  Synthetic Polynucleotide
gcagatgcag

SEQ ID NO: 605 - DNA, 10 bp, Artificial Sequence
  Synthetic Polynucleotide
agcttccaca

SEQ ID NO: 606 - DNA, 10 bp, Artificial Sequence
  Synthetic Polynucleotide
gcaggagcag

SEQ ID NO: 607 - DNA, 10 bp, Artificial Sequence
  Synthetic Polynucleotide
cgctccagtt

SEQ ID NO: 608 - DNA, 10 bp, Artificial Sequence
  Synthetic Polynucleotide
tacgacaaca

SEQ ID NO: 609 - DNA, 10 bp, Artificial Sequence
  Synthetic Polynucleotide
acgtgtacgc

SEQ ID NO: 610 - DNA, 10 bp, Artificial Sequence
  Synthetic Polynucleotide
catttcgccg

SEQ ID NO: 611 - DNA, 10 bp, Artificial Sequence
  Synthetic Polynucleotide
cgacgacgac

SEQ ID NO: 612 - DNA, 10 bp, Artificial Sequence
  Synthetic Polynucleotide
accaccaccg

SEQ ID NO: 613 - DNA, 10 bp, Artificial Sequence
  Synthetic Polynucleotide
tcgcagacac

SEQ ID NO: 614 - DNA, 10 bp, Artificial Sequence
  Synthetic Polynucleotide
tgtgaccagt

SEQ ID NO: 615 - DNA, 10 bp, Artificial Sequence
  Synthetic Polynucleotide
gtcgcaatcg

SEQ ID NO: 616 - DNA, 10 bp, Artificial Sequence
  Synthetic Polynucleotide
aacggttacg

SEQ ID NO: 617 - DNA, 10 bp, Artificial Sequence
  Synthetic Polynucleotide
tcgcaacaaa

SEQ ID NO: 618 - DNA, 10 bp, Artificial Sequence
  Synthetic Polynucleotide
ccgagggtaa

SEQ ID NO: 619 - DNA, 10 bp, Artificial Sequence
  Synthetic Polynucleotide
acatggacga

SEQ ID NO: 620 - DNA, 10 bp, Artificial Sequence
  Synthetic Polynucleotide
cggttcccat

SEQ ID NO: 621 - DNA, 10 bp, Artificial Sequence
  Synthetic Polynucleotide
tcgtgaggag

SEQ ID NO: 622 - DNA, 10 bp, Artificial Sequence
  Synthetic Polynucleotide
tgttagccga

SEQ ID NO: 623 - DNA, 10 bp, Artificial Sequence
  Synthetic Polynucleotide
cccacgacga

SEQ ID NO: 624 - DNA, 10 bp, Artificial Sequence
  Synthetic Polynucleotide
cagactgtgc

SEQ ID NO: 625 - DNA, 10 bp, Artificial Sequence
  Synthetic Polynucleotide
ttggtgcggc

SEQ ID NO: 626 - DNA, 10 bp, Artificial Sequence
  Synthetic Polynucleotide
tgccgcacta

SEQ ID NO: 627 - DNA, 10 bp, Artificial Sequence
  Synthetic Polynucleotide
ggttttgcct

SEQ ID NO: 628 - DNA, 10 bp, Artificial Sequence
  Synthetic Polynucleotide
gcgtcccaga

SEQ ID NO: 629 - DNA, 10 bp, Artificial Sequence
  Synthetic Polynucleotide
gtccagaggc

SEQ ID NO: 630 - DNA, 10 bp, Artificial Sequence
  Synthetic Polynucleotide
accaaaccca

SEQ ID NO: 631 - DNA, 10 bp, Artificial Sequence
  Synthetic Polynucleotide
ttggtggggc

SEQ ID NO: 632 - DNA, 10 bp, Artificial Sequence
  Synthetic Polynucleotide
acgaggacta

SEQ ID NO: 633 - DNA, 10 bp, Artificial Sequence
  Synthetic Polynucleotide
attggtgcga

SEQ ID NO: 634 - DNA, 10 bp, Artificial Sequence
  Synthetic Polynucleotide
tgtggactca

SEQ ID NO: 635 - DNA, 10 bp, Artificial Sequence
  Synthetic Polynucleotide
ccagtggcgg

SEQ ID NO: 636 - DNA, 10 bp, Artificial Sequence
  Synthetic Polynucleotide
gcaacaggca

SEQ ID NO: 637 - DNA, 10 bp, Artificial Sequence
  Synthetic Polynucleotide
ctattggcgg

SEQ ID NO: 638 - DNA, 10 bp, Artificial Sequence
  Synthetic Polynucleotide
tgtccaggca

SEQ ID NO: 639 - DNA, 10 bp, Artificial Sequence
  Synthetic Polynucleotide
ttgcaccagg

SEQ ID NO: 640 - DNA, 10 bp, Artificial Sequence
  Synthetic Polynucleotide
cgtgcctaag

SEQ ID NO: 641 - DNA, 10 bp, Artificial Sequence
  Synthetic Polynucleotide
ggaggcatct

SEQ ID NO: 642 - DNA, 10 bp, Artificial Sequence
  Synthetic Polynucleotide
gtgctcagca

SEQ ID NO: 643 - DNA, 10 bp, Artificial Sequence
  Synthetic Polynucleotide
ccttccgaag

SEQ ID NO: 644 - DNA, 10 bp, Artificial Sequence
  Synthetic Polynucleotide
ccatccagct

SEQ ID NO: 645 - DNA, 10 bp, Artificial Sequence
  Synthetic Polynucleotide
gttgcacccg

SEQ ID NO: 646 - DNA, 10 bp, Artificial Sequence
  Synthetic Polynucleotide
gtcgttgaga

SEQ ID NO: 647 - DNA, 10 bp, Artificial Sequence
  Synthetic Polynucleotide
ggtacccgag

SEQ ID NO: 648 - DNA, 10 bp, Artificial Sequence
  Synthetic Polynucleotide
ccgcattcta

SEQ ID NO: 649 - DNA, 10 bp, Artificial Sequence
  Synthetic Polynucleotide
acgcagacct

SEQ ID NO: 650 - DNA, 10 bp, Artificial Sequence
  Synthetic Polynucleotide
gcatcgttgg

SEQ ID NO: 651 - DNA, 10 bp, Artificial Sequence
  Synthetic Polynucleotide
agacatgggg

SEQ ID NO: 652 - DNA, 10 bp, Artificial Sequence
  Synthetic Polynucleotide
aggggcatcc

SEQ ID NO: 653 - DNA, 10 bp, Artificial Sequence
  Synthetic Polynucleotide
gcctattgcc

SEQ ID NO: 654 - DNA, 10 bp, Artificial Sequence
  Synthetic Polynucleotide
ggggcatcaa

SEQ ID NO: 655 - DNA, 10 bp, Artificial Sequence
  Synthetic Polynucleotide
accgtaccac

SEQ ID NO: 656 - DNA, 10 bp, Artificial Sequence
  Synthetic Polynucleotide
gacgactcgt

SEQ ID NO: 657 - DNA, 10 bp, Artificial Sequence
  Synthetic Polynucleotide
gtggctcgcc

SEQ ID NO: 658 - DNA, 10 bp, Artificial Sequence
  Synthetic Polynucleotide
cgggcatcaa

SEQ ID NO: 659 - DNA, 10 bp, Artificial Sequence
  Synthetic Polynucleotide
cgccatctgg

SEQ ID NO: 660 - DNA, 10 bp, Artificial Sequence
  Synthetic Polynucleotide
cttaggggca

SEQ ID NO: 661 - DNA, 10 bp, Artificial Sequence
  Synthetic Polynucleotide
ctccactggg

SEQ ID NO: 662 - DNA, 10 bp, Artificial Sequence
  Synthetic Polynucleotide
aggggcatcc

SEQ ID NO: 663 - DNA, 10 bp, Artificial Sequence
  Synthetic Polynucleotide
gcccattgta

SEQ ID NO: 664 - DNA, 10 bp, Artificial Sequence
  Synthetic Polynucleotide
actgacgttg

SEQ ID NO: 665 - DNA, 10 bp, Artificial Sequence
  Synthetic Polynucleotide
tccttgctct

SEQ ID NO: 666 - DNA, 10 bp, Artificial Sequence
  Synthetic Polynucleotide
gcatcaccag

SEQ ID NO: 667 - DNA, 10 bp, Artificial Sequence
  Synthetic Polynucleotide
taccaccaga

SEQ ID NO: 668 - DNA, 10 bp, Artificial Sequence
  Synthetic Polynucleotide
tcgaactcct

SEQ ID NO: 669 - DNA, 10 bp, Artificial Sequence
  Synthetic Polynucleotide
tggactgaga

SEQ ID NO: 670 - DNA, 10 bp, Artificial Sequence
  Synthetic Polynucleotide
cacaccacca

SEQ ID NO: 671 - DNA, 10 bp, Artificial Sequence
  Synthetic Polynucleotide
cccataggga

SEQ ID NO: 672 - DNA, 10 bp, Artificial Sequence
  Synthetic Polynucleotide
ccggagtgaa

SEQ ID NO: 673 - DNA, 10 bp, Artificial Sequence
  Synthetic Polynucleotide
cgctgctatg

SEQ ID NO: 674 - DNA, 10 bp, Artificial Sequence
  Synthetic Polynucleotide
gaatgtcgct

SEQ ID NO: 675 - DNA, 10 bp, Artificial Sequence
  Synthetic Polynucleotide
tgtgcgagac

SEQ ID NO: 676 - DNA, 10 bp, Artificial Sequence
  Synthetic Polynucleotide
gacctcgtcc

SEQ ID NO: 677 - DNA, 10 bp, Artificial Sequence
  Synthetic Polynucleotide
tttccaccga

SEQ ID NO: 678 - DNA, 10 bp, Artificial Sequence
  Synthetic Polynucleotide
tcgctgactt

SEQ ID NO: 679 - DNA, 10 bp, Artificial Sequence
  Synthetic Polynucleotide
ttcggctgag

SEQ ID NO: 680 - DNA, 10 bp, Artificial Sequence
  Synthetic Polynucleotide
ctcggctgtc

SEQ ID NO: 681 - DNA, 10 bp, Artificial Sequence
  Synthetic Polynucleotide
ctcacggagt

SEQ ID NO: 682 - DNA, 10 bp, Artificial Sequence
  Synthetic Polynucleotide
cagcaaaggt

SEQ ID NO: 683 - DNA, 10 bp, Artificial Sequence
  Synthetic Polynucleotide
tttctgggct

SEQ ID NO: 684 - DNA, 10 bp, Artificial Sequence
  Synthetic Polynucleotide
ggggtaacgc

SEQ ID NO: 685 - DNA, 10 bp, Artificial Sequence
  Synthetic Polynucleotide
tagctgttga

SEQ ID NO: 686 - DNA, 10 bp, Artificial Sequence
  Synthetic Polynucleotide
tcggcctaca

SEQ ID NO: 687 - DNA, 10 bp, Artificial Sequence
  Synthetic Polynucleotide
tccgatgaga

SEQ ID NO: 688 - DNA, 10 bp, Artificial Sequence
  Synthetic Polynucleotide
cttccgacag

SEQ ID NO: 689 - DNA, 10 bp, Artificial Sequence
  Synthetic Polynucleotide
tgtcgctggg

SEQ ID NO: 690 - DNA, 10 bp, Artificial Sequence
  Synthetic Polynucleotide
tcccttgacg

SEQ ID NO: 691 - DNA, 10 bp, Artificial Sequence
  Synthetic Polynucleotide
gttcctcgct

SEQ ID NO: 692 - DNA, 10 bp, Artificial Sequence
  Synthetic Polynucleotide
ccggagacag

SEQ ID NO: 693 - DNA, 10 bp, Artificial Sequence
  Synthetic Polynucleotide
gccttgcatg

SEQ ID NO: 694 - DNA, 10 bp, Artificial Sequence
  Synthetic Polynucleotide
cgagcctcct

SEQ ID NO: 695 - DNA, 10 bp, Artificial Sequence
  Synthetic Polynucleotide
atgacgcagt

SEQ ID NO: 696 - DNA, 10 bp, Artificial Sequence
  Synthetic Polynucleotide
tcccagtcgg

SEQ ID NO: 697 - DNA, 10 bp, Artificial Sequence
  Synthetic Polynucleotide
cagtgtcagc

SEQ ID NO: 698 - DNA, 10 bp, Artificial Sequence
  Synthetic Polynucleotide
cctccttcca

SEQ ID NO: 699 - DNA, 10 bp, Artificial Sequence
  Synthetic Polynucleotide
tgctcatggc

SEQ ID NO: 700 - DNA, 10 bp, Artificial Sequence
  Synthetic Polynucleotide
gggtcaggct

SEQ ID NO: 701 - DNA, 10 bp, Artificial Sequence
  Synthetic Polynucleotide
cagcacagtg

SEQ ID NO: 702 - DNA, 10 bp, Artificial Sequence
  Synthetic Polynucleotide
ggtccagttg

SEQ ID NO: 703 - DNA, 10 bp, Artificial Sequence
  Synthetic Polynucleotide
tgggtgtttg

SEQ ID NO: 704 - DNA, 10 bp, Artificial Sequence
  Synthetic Polynucleotide
ggacctccaa

SEQ ID NO: 705 - DNA, 10 bp, Artificial Sequence
  Synthetic Polynucleotide
ttgctgcttg

SEQ ID NO: 706 - DNA, 10 bp, Artificial Sequence
  Synthetic Polynucleotide
tcagaggcat

SEQ ID NO: 707 - DNA, 10 bp, Artificial Sequence
  Synthetic Polynucleotide
agctcagtgg

SEQ ID NO: 708 - DNA, 10 bp, Artificial Sequence
  Synthetic Polynucleotide
cgcacagccc

SEQ ID NO: 709 - DNA, 10 bp, Artificial Sequence
  Synthetic Polynucleotide
tctgctttgg

SEQ ID NO: 710 - DNA, 10 bp, Artificial Sequence
  Synthetic Polynucleotide
aagctcccta

SEQ ID NO: 711 - DNA, 10 bp, Artificial Sequence
  Synthetic Polynucleotide
tcttggcatc

SEQ ID NO: 712 - DNA, 10 bp, Artificial Sequence
  Synthetic Polynucleotide
gctcaagccc

SEQ ID NO: 713 - DNA, 10 bp, Artificial Sequence
  Synthetic Polynucleotide
agacgggcag

SEQ ID NO: 714 - DNA, 10 bp, Artificial Sequence
  Synthetic Polynucleotide
tggttgagga

SEQ ID NO: 715 - DNA, 10 bp, Artificial Sequence
  Synthetic Polynucleotide
ccacaacgga

SEQ ID NO: 716 - DNA, 10 bp, Artificial Sequence
  Synthetic Polynucleotide
ggcagtggaa

SEQ ID NO: 717 - DNA, 10 bp, Artificial Sequence
  Synthetic Polynucleotide
gcgaaggtca

SEQ ID NO: 718 - DNA, 10 bp, Artificial Sequence
  Synthetic Polynucleotide
tcccaaagca

SEQ ID NO: 719 - DNA, 10 bp, Artificial Sequence
  Synthetic Polynucleotide
cttgcagggc

SEQ ID NO: 720 - DNA, 10 bp, Artificial Sequence
  Synthetic Polynucleotide
tgtgcggtga

SEQ ID NO: 721 - DNA, 10 bp, Artificial Sequence
  Synthetic Polynucleotide
gtttgagcca

SEQ ID NO: 722 - DNA, 10 bp, Artificial Sequence
  Synthetic Polynucleotide
gatgccatga

SEQ ID NO: 723 - DNA, 10 bp, Artificial Sequence
  Synthetic Polynucleotide
tgaaggcaga

SEQ ID NO: 724 - DNA, 10 bp, Artificial Sequence
  Synthetic Polynucleotide
cgcaagatgt

SEQ ID NO: 725 - DNA, 10 bp, Artificial Sequence
  Synthetic Polynucleotide
tatggtgcag

SEQ ID NO: 726 - DNA, 10 bp, Artificial Sequence
  Synthetic Polynucleotide
tagtgtgctc

SEQ ID NO: 727 - DNA, 10 bp, Artificial Sequence
  Synthetic Polynucleotide
aatgggtggg

SEQ ID NO: 728 - DNA, 10 bp, Artificial Sequence
  Synthetic Polynucleotide
tcacagcttg

SEQ ID NO: 729 - DNA, 10 bp, Artificial Sequence
  Synthetic Polynucleotide
cagagactgc

SEQ ID NO: 730 - DNA, 10 bp, Artificial Sequence
  Synthetic Polynucleotide
gcagctctta

SEQ ID NO: 731 - DNA, 10 bp, Artificial Sequence
  Synthetic Polynucleotide
tcaggatggt

SEQ ID NO: 732 - DNA, 10 bp, Artificial Sequence
  Synthetic Polynucleotide
tggtgcagct

SEQ ID NO: 733 - DNA, 10 bp, Artificial Sequence
  Synthetic Polynucleotide
catggggttc

SEQ ID NO: 734 - DNA, 10 bp, Artificial Sequence
  Synthetic Polynucleotide
tacgtgcata

SEQ ID NO: 735 - DNA, 10 bp, Artificial Sequence
  Synthetic Polynucleotide
tgggtgatga

SEQ ID NO: 736 - DNA, 10 bp, Artificial Sequence
  Synthetic Polynucleotide
tactgtccca

SEQ ID NO: 737 - DNA, 10 bp, Artificial Sequence
  Synthetic Polynucleotide
tggcatggac

SEQ ID NO: 738 - DNA, 10 bp, Artificial Sequence
  Synthetic Polynucleotide
gagagggaga

SEQ ID NO: 739 - DNA, 10 bp, Artificial Sequence
  Synthetic Polynucleotide
aacctcagca

SEQ ID NO: 740 - DNA, 10 bp, Artificial Sequence
  Synthetic Polynucleotide
cccatctggg

SEQ ID NO: 741 - DNA, 10 bp, Artificial Sequence
  Synthetic Polynucleotide
tggttttgcc

SEQ ID NO: 742 - DNA, 10 bp, Artificial Sequence
  Synthetic Polynucleotide
gctgttgcaa

SEQ ID NO: 743 - DNA, 10 bp, Artificial Sequence
  Synthetic Polynucleotide
acagcatggc

SEQ ID NO: 744 - DNA, 10 bp, Artificial Sequence
  Synthetic Polynucleotide
accacccacc

SEQ ID NO: 745 - DNA, 10 bp, Artificial Sequence
  Synthetic Polynucleotide
ttgccaggta

SEQ ID NO: 746 - DNA, 10 bp, Artificial Sequence
  Synthetic Polynucleotide
ccctgttgga

SEQ ID NO: 747 - DNA, 10 bp, Artificial Sequence
  Synthetic Polynucleotide
gctggaatga

SEQ ID NO: 748 - DNA, 10 bp, Artificial Sequence
  Synthetic Polynucleotide
tgcaccatca

SEQ ID NO: 749 - DNA, 10 bp, Artificial Sequence
  Synthetic Polynucleotide
ggtgcatggg

SEQ ID NO: 750 - DNA, 10 bp, Artificial Sequence
  Synthetic Polynucleotide
gagcaatcga

SEQ ID NO: 751 - DNA, 10 bp, Artificial Sequence
  Synthetic Polynucleotide
ggtcctccaa

SEQ ID NO: 752 - DNA, 10 bp, Artificial Sequence
  Synthetic Polynucleotide
ggccttcttc

SEQ ID NO: 753 - DNA, 10 bp, Artificial Sequence
  Synthetic Polynucleotide
cctcaacgga

SEQ ID NO: 754 - DNA, 10 bp, Artificial Sequence
  Synthetic Polynucleotide
cgcaggaaca

SEQ ID NO: 755 - DNA, 10 bp, Artificial Sequence
  Synthetic Polynucleotide
agtcaggtga

SEQ ID NO: 756 - DNA, 10 bp, Artificial Sequence
  Synthetic Polynucleotide
ggcattgaca

SEQ ID NO: 757 - DNA, 10 bp, Artificial Sequence
  Synthetic Polynucleotide
aggatgcaga

SEQ ID NO: 758 - DNA, 10 bp, Artificial Sequence
  Synthetic Polynucleotide
cagcagcaaa

SEQ ID NO: 759 - DNA, 10 bp, Artificial Sequence
  Synthetic Polynucleotide
aggcagcata

SEQ ID NO: 760 - DNA, 10 bp, Artificial Sequence
  Synthetic Polynucleotide
accaaggaga

SEQ ID NO: 761 - DNA, 10 bp, Artificial Sequence
  Synthetic Polynucleotide
tggttgcaag

SEQ ID NO: 762 - DNA, 10 bp, Artificial Sequence
  Synthetic Polynucleotide
actgactgca

SEQ ID NO: 763 - DNA, 10 bp, Artificial Sequence
  Synthetic Polynucleotide
aaccacttgc

SEQ ID NO: 764 - DNA, 10 bp, Artificial Sequence
  Synthetic Polynucleotide
tagtgtgcta

SEQ ID NO: 765 - DNA, 10 bp, Artificial Sequence
  Synthetic Polynucleotide
tggatgtgca

SEQ ID NO: 766 - DNA, 10 bp, Artificial Sequence
  Synthetic Polynucleotide
gtcatctggc

SEQ ID NO: 767 - DNA, 10 bp, Artificial Sequence
  Synthetic Polynucleotide
cgccatgaac

SEQ ID NO: 768 - DNA, 10 bp, Artificial Sequence
  Synthetic Polynucleotide
cacggcccca

SEQ ID NO: 769 - DNA, 10 bp, Artificial Sequence
  Synthetic Polynucleotide
tggcccttgc

SEQ ID NO: 770 - DNA, 10 bp, Artificial Sequence
  Synthetic Polynucleotide
gttgccatca

SEQ ID NO: 771 - DNA, 10 bp, Artificial Sequence
  Synthetic Polynucleotide
gaccctggtg

SEQ ID NO: 772 - DNA, 10 bp, Artificial Sequence
  Synthetic Polynucleotide
tatgctccct

SEQ ID NO: 773 - DNA, 10 bp, Artificial Sequence
  Synthetic Polynucleotide
tgggtgggtt

SEQ ID NO: 774 - DNA, 10 bp, Artificial Sequence
  Synthetic Polynucleotide
cccattcacc

SEQ ID NO: 775 - DNA, 10 bp, Artificial Sequence
  Synthetic Polynucleotide
gtggtgatgg

SEQ ID NO: 776 - DNA, 10 bp, Artificial Sequence
  Synthetic Polynucleotide
tagcttgcag

SEQ ID NO: 777 - DNA, 10 bp, Artificial Sequence
  Synthetic Polynucleotide
acaagcaggt

SEQ ID NO: 778 - DNA, 10 bp, Artificial Sequence
  Synthetic Polynucleotide
cacagtgcaa

SEQ ID NO: 779 - DNA, 10 bp, Artificial Sequence
  Synthetic Polynucleotide
tcagaaggct

SEQ ID NO: 780 - DNA, 10 bp, Artificial Sequence
  Synthetic Polynucleotide
tcagctctgg

SEQ ID NO: 781 - DNA, 10 bp, Artificial Sequence
  Synthetic Polynucleotide
ccaacatgcc

SEQ ID NO: 782 - DNA, 10 bp, Artificial Sequence
  Synthetic Polynucleotide
catgcacagg

SEQ ID NO: 783 - DNA, 10 bp, Artificial Sequence
  Synthetic Polynucleotide
cccaccaaga

SEQ ID NO: 784 - DNA, 10 bp, Artificial Sequence
  Synthetic Polynucleotide
ccgcaggaac

SEQ ID NO: 785 - DNA, 10 bp, Artificial Sequence
  Synthetic Polynucleotide
ggcaattgga

SEQ ID NO: 786 - DNA, 10 bp, Artificial Sequence
  Synthetic Polynucleotide
tgggcattga

SEQ ID NO: 787 - DNA, 10 bp, Artificial Sequence
  Synthetic Polynucleotide
tggagttgca

SEQ ID NO: 788 - DNA, 10 bp, Artificial Sequence
  Synthetic Polynucleotide
cagcactcac

SEQ ID NO: 789 - DNA, 10 bp, Artificial Sequence
  Synthetic Polynucleotide
gatgggcttc

SEQ ID NO: 790 - DNA, 10 bp, Artificial Sequence
  Synthetic Polynucleotide
acatccccta

SEQ ID NO: 791 - DNA, 10 bp, Artificial Sequence
  Synthetic Polynucleotide
gcagacaaga

SEQ ID NO: 792 - DNA, 10 bp, Artificial Sequence
  Synthetic Polynucleotide
tgctgttctg

SEQ ID NO: 793 - DNA, 10 bp, Artificial Sequence
  Synthetic Polynucleotide
caccacatgg

SEQ ID NO: 794 - DNA, 10 bp, Artificial Sequence
  Synthetic Polynucleotide
cgttgccgca

SEQ ID NO: 795 - DNA, 10 bp, Artificial Sequence
  Synthetic Polynucleotide
gctgcatcag

SEQ ID NO: 796 - DNA, 10 bp, Artificial Sequence
  Synthetic Polynucleotide
actctgccat

SEQ ID NO: 797 - DNA, 10 bp, Artificial Sequence
  Synthetic Polynucleotide
tgaaggctct

SEQ ID NO: 798 - DNA, 10 bp, Artificial Sequence
  Synthetic Polynucleotide
gcaaaagcac

SEQ ID NO: 799 - DNA, 10 bp, Artificial Sequence
  Synthetic Polynucleotide
tccatgaagc

SEQ ID NO: 800 - DNA, 10 bp, Artificial Sequence
  Synthetic Polynucleotide
gagcaatcga

SEQ ID NO: 801 - DNA, 10 bp, Artificial Sequence
  Synthetic Polynucleotide
cttgccatca

SEQ ID NO: 802 - DNA, 10 bp, Artificial Sequence
  Synthetic Polynucleotide
tagtgtgcta

SEQ ID NO: 803 - DNA, 10 bp, Artificial Sequence
  Synthetic Polynucleotide
gcgccagtag

SEQ ID NO: 804 - DNA, 10 bp, Artificial Sequence
  Synthetic Polynucleotide
agccttctga

SEQ ID NO: 805 - DNA, 10 bp, Artificial Sequence
  Synthetic Polynucleotide
ggtcaagctc

SEQ ID NO: 806 - DNA, 10 bp, Artificial Sequence
  Synthetic Polynucleotide
tgcactagca

SEQ ID NO: 807 - DNA, 10 bp, Artificial Sequence
  Synthetic Polynucleotide
gatgggcaac

SEQ ID NO: 808 - DNA, 10 bp, Artificial Sequence
  Synthetic Polynucleotide
taagggcata

SEQ ID NO: 809 - DNA, 10 bp, Artificial Sequence
  Synthetic Polynucleotide
gactgctcag

SEQ ID NO: 810 - DNA, 10 bp, Artificial Sequence
  Synthetic Polynucleotide
cctgccactc

SEQ ID NO: 811 - DNA, 10 bp, Artificial Sequence
  Synthetic Polynucleotide
tgcaaatgga

SEQ ID NO: 812 - DNA, 10 bp, Artificial Sequence
  Synthetic Polynucleotide
tcaggcaact

SEQ ID NO: 813 - DNA, 10 bp, Artificial Sequence
  Synthetic Polynucleotide
tgcaaacctg

SEQ ID NO: 814 - DNA, 10 bp, Artificial Sequence
  Synthetic Polynucleotide
tcagtcctca

SEQ ID NO: 815 - DNA, 10 bp, Artificial Sequence
  Synthetic Polynucleotide
gtgtgccagg

SEQ ID NO: 816 - DNA, 10 bp, Artificial Sequence
  Synthetic Polynucleotide
tcgcatcccc

SEQ ID NO: 817 - DNA, 10 bp, Artificial Sequence
  Synthetic Polynucleotide
caggcaatga

SEQ ID NO: 818 - DNA, 10 bp, Artificial Sequence
  Synthetic Polynucleotide
tctggagaca

SEQ ID NO: 819 - DNA, 10 bp, Artificial Sequence
  Synthetic Polynucleotide
caggattggc

SEQ ID NO: 820 - DNA, 10 bp, Artificial Sequence
  Synthetic Polynucleotide
tcaccaggat

SEQ ID NO: 821 - DNA, 10 bp, Artificial Sequence
  Synthetic Polynucleotide
atgtctggga

SEQ ID NO: 822 - DNA, 10 bp, Artificial Sequence
  Synthetic Polynucleotide
ttgcagcttg

SEQ ID NO: 823 - DNA, 10 bp, Artificial Sequence
  Synthetic Polynucleotide
atgcatccca

SEQ ID NO: 824 - DNA, 10 bp, Artificial Sequence
  Synthetic Polynucleotide
caaagaccgg

SEQ ID NO: 825 - DNA, 10 bp, Artificial Sequence
  Synthetic Polynucleotide
taggtgggcc

SEQ ID NO: 826 - DNA, 10 bp, Artificial Sequence
  Synthetic Polynucleotide
ctgtcacggt

SEQ ID NO: 827 - DNA, 10 bp, Artificial Sequence
  Synthetic Polynucleotide
cagcttgtgg

SEQ ID NO: 828 - DNA, 10 bp, Artificial Sequence
  Synthetic Polynucleotide
taaccactgg

SEQ ID NO: 829 - DNA, 10 bp, Artificial Sequence
  Synthetic Polynucleotide
cgctcgaatt

SEQ ID NO: 830 - DNA, 10 bp, Artificial Sequence
  Synthetic Polynucleotide
gagtgctcac

SEQ ID NO: 831 - DNA, 10 bp, Artificial Sequence
  Synthetic Polynucleotide
acagccagtt

SEQ ID NO: 832 - DNA, 10 bp, Artificial Sequence
  Synthetic Polynucleotide
gggcgtatga

SEQ ID NO: 833 - DNA, 10 bp, Artificial Sequence
  Synthetic Polynucleotide
tgacacacca

SEQ ID NO: 834 - DNA, 10 bp, Artificial Sequence
  Synthetic Polynucleotide
ctgctgtccc

SEQ ID NO: 835 - DNA, 10 bp, Artificial Sequence
  Synthetic Polynucleotide
atgggaacgt

SEQ ID NO: 836 - DNA, 10 bp, Artificial Sequence
  Synthetic Polynucleotide
caccattgct

SEQ ID NO: 837 - DNA, 10 bp, Artificial Sequence
  Synthetic Polynucleotide
ggcaaactgc

SEQ ID NO: 838 - DNA, 10 bp, Artificial Sequence
  Synthetic Polynucleotide
tacccctgaa

SEQ ID NO: 839 - DNA, 10 bp, Artificial Sequence
  Synthetic Polynucleotide
acagaacccc

SEQ ID NO: 840 - DNA, 10 bp, Artificial Sequence
  Synthetic Polynucleotide
acaggaacca

SEQ ID NO: 841 - DNA, 10 bp, Artificial Sequence
  Synthetic Polynucleotide
gccatgtcct

SEQ ID NO: 842 - DNA, 10 bp, Artificial Sequence
  Synthetic Polynucleotide
gctctgcaag

SEQ ID NO: 843 - DNA, 10 bp, Artificial Sequence
  Synthetic Polynucleotide
gtggcgacat

SEQ ID NO: 844 - DNA, 10 bp, Artificial Sequence
  Synthetic Polynucleotide
cacggacctg

SEQ ID NO: 845 - DNA, 10 bp, Artificial Sequence
  Synthetic Polynucleotide
tagctgtgga

SEQ ID NO: 846 - DNA, 10 bp, Artificial Sequence
  Synthetic Polynucleotide
taggctccct

SEQ ID NO: 847 - DNA, 10 bp, Artificial Sequence
  Synthetic Polynucleotide
agggtggttt

SEQ ID NO: 848 - DNA, 10 bp, Artificial Sequence
  Synthetic Polynucleotide
caaccccatg

SEQ ID NO: 849 - DNA, 10 bp, Artificial Sequence
  Synthetic Polynucleotide
caggaccaac

SEQ ID NO: 850 - DNA, 10 bp, Artificial Sequence
  Synthetic Polynucleotide
ctgtttggcc

SEQ ID NO: 851 - DNA, 10 bp, Artificial Sequence
  Synthetic Polynucleotide
gacttcgtga

SEQ ID NO: 852 - DNA, 10 bp, Artificial Sequence
  Synthetic Polynucleotide
ttggtggcat

SEQ ID NO: 853 - DNA, 10 bp, Artificial Sequence
  Synthetic Polynucleotide
gtgacaccag

SEQ ID NO: 854 - DNA, 10 bp, Artificial Sequence
  Synthetic Polynucleotide
tccccattga

SEQ ID NO: 855 - DNA, 10 bp, Artificial Sequence
  Synthetic Polynucleotide
tgcctgtgca

SEQ ID NO: 856 - DNA, 10 bp, Artificial Sequence
  Synthetic Polynucleotide
gcttgtctgc

SEQ ID NO: 857 - DNA, 10 bp, Artificial Sequence
  Synthetic Polynucleotide
gagcaatcgg

SEQ ID NO: 858 - DNA, 10 bp, Artificial Sequence
  Synthetic Polynucleotide
ttgcgtgtga

SEQ ID NO: 859 - DNA, 10 bp, Artificial Sequence
  Synthetic Polynucleotide
ggccttcggg

SEQ ID NO: 860 - DNA, 10 bp, Artificial Sequence
  Synthetic Polynucleotide
ttgaagctgc

SEQ ID NO: 861 - DNA, 10 bp, Artificial Sequence
  Synthetic Polynucleotide
cagccattca

SEQ ID NO: 862 - DNA, 10 bp, Artificial Sequence
  Synthetic Polynucleotide
tccacaagct

SEQ ID NO: 863 - DNA, 10 bp, Artificial Sequence
  Synthetic Polynucleotide
gaccagaggt

SEQ ID NO: 864 - DNA, 10 bp, Artificial Sequence
  Synthetic Polynucleotide
accaacacct

SEQ ID NO: 865 - DNA, 10 bp, Artificial Sequence
  Synthetic Polynucleotide
tgatgcacct

SEQ ID NO: 866 - DNA, 10 bp, Artificial Sequence
  Synthetic Polynucleotide
ttcaggcgtg

SEQ ID NO: 867 - DNA, 10 bp, Artificial Sequence
  Synthetic Polynucleotide
tagctgcaag

SEQ ID NO: 868 - DNA, 10 bp, Artificial Sequence
  Synthetic Polynucleotide
atcttgggct

SEQ ID NO: 869 - DNA, 10 bp, Artificial Sequence
  Synthetic Polynucleotide
tttggggagg

SEQ ID NO: 870 - DNA, 10 bp, Artificial Sequence
  Synthetic Polynucleotide
gctccaccta

SEQ ID NO: 871 - DNA, 10 bp, Artificial Sequence
  Synthetic Polynucleotide
tcacatggga

SEQ ID NO: 872 - DNA, 10 bp, Artificial Sequence
  Synthetic Polynucleotide
ctgctcctca

SEQ ID NO: 873 - DNA, 10 bp, Artificial Sequence
  Synthetic Polynucleotide
agctcctgtt

SEQ ID NO: 874 - DNA, 10 bp, Artificial Sequence
  Synthetic Polynucleotide
atcccacacc

SEQ ID NO: 875 - DNA, 10 bp, Artificial Sequence
  Synthetic Polynucleotide
accgtaagga

SEQ ID NO: 876 - DNA, 10 bp, Artificial Sequence
  Synthetic Polynucleotide
aggcgaactg

SEQ ID NO: 877 - DNA, 10 bp, Artificial Sequence
  Synthetic Polynucleotide
gttgctttgc

SEQ ID NO: 878 - DNA, 10 bp, Artificial Sequence
  Synthetic Polynucleotide
gcactcctcc

SEQ ID NO: 879 - DNA, 10 bp, Artificial Sequence
  Synthetic Polynucleotide
cctgatggga

SEQ ID NO: 880 - DNA, 10 bp, Artificial Sequence
  Synthetic Polynucleotide
ccctagctcc

SEQ ID NO: 881 - DNA, 10 bp, Artificial Sequence
  Synthetic Polynucleotide
ccagtgtcac

SEQ ID NO: 882 - DNA, 10 bp, Artificial Sequence
  Synthetic Polynucleotide
tatgggctgc

SEQ ID NO: 883 - DNA, 10 bp, Artificial Sequence
  Synthetic Polynucleotide
ggctgtagct

SEQ ID NO: 884 - DNA, 10 bp, Artificial Sequence
  Synthetic Polynucleotide
acaactgctg

SEQ ID NO: 885 - DNA, 10 bp, Artificial Sequence
  Synthetic Polynucleotide
agtgggtcac

SEQ ID NO: 886 - DNA, 10 bp, Artificial Sequence
  Synthetic Polynucleotide
cggcctgact

SEQ ID NO: 887 - DNA, 10 bp, Artificial Sequence
  Synthetic Polynucleotide
tgggatgaga

SEQ ID NO: 888 - DNA, 10 bp, Artificial Sequence
  Synthetic Polynucleotide
tcaagcctcc

SEQ ID NO: 889 - DNA, 10 bp, Artificial Sequence
  Synthetic Polynucleotide
ggtcaagctc

SEQ ID NO: 890 - DNA, 10 bp, Artificial Sequence
  Synthetic Polynucleotide
tcatggcaca

SEQ ID NO: 891 - DNA, 10 bp, Artificial Sequence
  Synthetic Polynucleotide
cagggaacac

SEQ ID NO: 892 - DNA, 10 bp, Artificial Sequence
  Synthetic Polynucleotide
ctgcatgtgc

SEQ ID NO: 893 - DNA, 10 bp, Artificial Sequence
  Synthetic Polynucleotide
tagaatgcga

SEQ ID NO: 894 - DNA, 10 bp, Artificial Sequence
  Synthetic Polynucleotide
tcatttggca

SEQ ID NO: 895 - DNA, 10 bp, Artificial Sequence
  Synthetic Polynucleotide
agctgaggtc

SEQ ID NO: 896 - DNA, 10 bp, Artificial Sequence
  Synthetic Polynucleotide
tccaacaagc

SEQ ID NO: 897 - DNA, 10 bp, Artificial Sequence
  Synthetic Polynucleotide
actggctgac

SEQ ID NO: 898 - DNA, 10 bp, Artificial Sequence
  Synthetic Polynucleotide
ccaacctggg

SEQ ID NO: 899 - DNA, 10 bp, Artificial Sequence
  Synthetic Polynucleotide
tggtgagcta

SEQ ID NO: 900 - DNA, 10 bp, Artificial Sequence
  Synthetic Polynucleotide
tactgatgcc

SEQ ID NO: 901 - DNA, 10 bp, Artificial Sequence
  Synthetic Polynucleotide
tgcaaccaag

SEQ ID NO: 902 - DNA, 10 bp, Artificial Sequence
  Synthetic Polynucleotide
gctcttggtg

SEQ ID NO: 903 - DNA, 10 bp, Artificial Sequence
  Synthetic Polynucleotide
aatccagggg

SEQ ID NO: 904 - DNA, 10 bp, Artificial Sequence
  Synthetic Polynucleotide
ggagggcgat

SEQ ID NO: 905 - DNA, 10 bp, Artificial Sequence
  Synthetic Polynucleotide
tgaagatcgc

SEQ ID NO: 906 - DNA, 10 bp, Artificial Sequence
  Synthetic Polynucleotide
gagcttcgtg

SEQ ID NO: 907 - DNA, 10 bp, Artificial Sequence
  Synthetic Polynucleotide
gtgaagggca

SEQ ID NO: 908 - DNA, 10 bp, Artificial Sequence
  Synthetic Polynucleotide
gggactccac

SEQ ID NO: 909 - DNA, 10 bp, Artificial Sequence
  Synthetic Polynucleotide
ccagcggtca

SEQ ID NO: 910 - DNA, 10 bp, Artificial Sequence
  Synthetic Polynucleotide
aatggctgga

SEQ ID NO: 911 - DNA, 10 bp, Artificial Sequence
  Synthetic Polynucleotide
agaattgccg

SEQ ID NO: 912 - DNA, 10 bp, Artificial Sequence
  Synthetic Polynucleotide
ggcatcaaca

SEQ ID NO: 913 - DNA, 10 bp, Artificial Sequence
  Synthetic Polynucleotide
ttcccacagg

SEQ ID NO: 914 - DNA, 10 bp, Artificial Sequence
  Synthetic Polynucleotide
tgtgattggc

SEQ ID NO: 915 - DNA, 10 bp, Artificial Sequence
  Synthetic Polynucleotide
tccacaagct

SEQ ID NO: 916 - DNA, 10 bp, Artificial Sequence
  Synthetic Polynucleotide
cctcagggtg

SEQ ID NO: 917 - DNA, 10 bp, Artificial Sequence
  Synthetic Polynucleotide
tgagaggtgg

SEQ ID NO: 918 - DNA, 10 bp, Artificial Sequence
  Synthetic Polynucleotide
tgcatggtga

SEQ ID NO: 919 - DNA, 10 bp, Artificial Sequence
  Synthetic Polynucleotide
tgatcgtgca

SEQ ID NO: 920 - DNA, 10 bp, Artificial Sequence
  Synthetic Polynucleotide
tggaccacat

SEQ ID NO: 921 - DNA, 10 bp, Artificial Sequence
  Synthetic Polynucleotide
gggctaggag

SEQ ID NO: 922 - DNA, 10 bp, Artificial Sequence
  Synthetic Polynucleotide
actcaaccca

SEQ ID NO: 923 - DNA, 10 bp, Artificial Sequence
  Synthetic Polynucleotide
ctgcgggtta

SEQ ID NO: 924 - DNA, 10 bp, Artificial Sequence
  Synthetic Polynucleotide
ggcccctgac

SEQ ID NO: 925 - DNA, 10 bp, Artificial Sequence
  Synthetic Polynucleotide
gcagcagaca

SEQ ID NO: 926 - DNA, 10 bp, Artificial Sequence
  Synthetic Polynucleotide
gggcaccacg

SEQ ID NO: 927 - DNA, 10 bp, Artificial Sequence
  Synthetic Polynucleotide
gcacatccac

SEQ ID NO: 928 - DNA, 10 bp, Artificial Sequence
  Synthetic Polynucleotide
tgcaccacaa

SEQ ID NO: 929 - DNA, 10 bp, Artificial Sequence
  Synthetic Polynucleotide
gggttgtgta

SEQ ID NO: 930 - DNA, 10 bp, Artificial Sequence
  Synthetic Polynucleotide
gcgagttagg

SEQ ID NO: 931 - DNA, 10 bp, Artificial Sequence
  Synthetic Polynucleotide
gcagcatctt

SEQ ID NO: 932 - DNA, 10 bp, Artificial Sequence
  Synthetic Polynucleotide
gttgcggccc

SEQ ID NO: 933 - DNA, 10 bp, Artificial Sequence
  Synthetic Polynucleotide
acggcctcct

SEQ ID NO: 934 - DNA, 10 bp, Artificial Sequence
  Synthetic Polynucleotide
tgtgttgagc

SEQ ID NO: 935 - DNA, 10 bp, Artificial Sequence
  Synthetic Polynucleotide
tccatttgca

SEQ ID NO: 936 - DNA, 10 bp, Artificial Sequence
  Synthetic Polynucleotide
taagcccaac

SEQ ID NO: 937 - DNA, 10 bp, Artificial Sequence
  Synthetic Polynucleotide
tccacttgca

SEQ ID NO: 938 - DNA, 10 bp, Artificial Sequence
  Synthetic Polynucleotide
tgcaccagca

SEQ ID NO: 939 - DNA, 10 bp, Artificial Sequence
  Synthetic Polynucleotide
gccactcata

SEQ ID NO: 940 - DNA, 10 bp, Artificial Sequence
  Synthetic Polynucleotide
tggaaatgcc

SEQ ID NO: 941 - DNA, 10 bp, Artificial Sequence
  Synthetic Polynucleotide
gctccttcca

SEQ ID NO: 942 - DNA, 10 bp, Artificial Sequence
  Synthetic Polynucleotide
aagagcagca

SEQ ID NO: 943 - DNA, 10 bp, Artificial Sequence
  Synthetic Polynucleotide
tgttgtcgtc

SEQ ID NO: 944 - DNA, 10 bp, Artificial Sequence
  Synthetic Polynucleotide
aatatgcggc

SEQ ID NO: 945 - DNA, 10 bp, Artificial Sequence
  Synthetic Polynucleotide
accttgagct

SEQ ID NO: 946 - DNA, 10 bp, Artificial Sequence
  Synthetic Polynucleotide
agttcgacga

SEQ ID NO: 947 - DNA, 10 bp, Artificial Sequence
  Synthetic Polynucleotide
cctcttgctg

SEQ ID NO: 948 - DNA, 10 bp, Artificial Sequence
  Synthetic Polynucleotide
gccatgtgct

SEQ ID NO: 949 - DNA, 10 bp, Artificial Sequence
  Synthetic Polynucleotide
tagcaactga

SEQ ID NO: 950 - DNA, 10 bp, Artificial Sequence
  Synthetic Polynucleotide
ttgcaagtgg

SEQ ID NO: 951 - DNA, 10 bp, Artificial Sequence
  Synthetic Polynucleotide
tctggactgt

SEQ ID NO: 952 - DNA, 10 bp, Artificial Sequence
  Synthetic Polynucleotide
cacaaggcaa

SEQ ID NO: 953 - DNA, 10 bp, Artificial Sequence
  Synthetic Polynucleotide
gctcctgtgt

SEQ ID NO: 954 - DNA, 10 bp, Artificial Sequence
  Synthetic Polynucleotide
aggaactcgc

SEQ ID NO: 955 - DNA, 10 bp, Artificial Sequence
  Synthetic Polynucleotide
gctgccaata

SEQ ID NO: 956 - DNA, 10 bp, Artificial Sequence
  Synthetic Polynucleotide
aaagccctca

SEQ ID NO: 957 - DNA, 10 bp, Artificial Sequence
  Synthetic Polynucleotide
tcgctgctat

SEQ ID NO: 958 - DNA, 10 bp, Artificial Sequence
  Synthetic Polynucleotide
aggtaaggcc

SEQ ID NO: 959 - DNA, 10 bp, Artificial Sequence
  Synthetic Polynucleotide
gctgaactgc

SEQ ID NO: 960 - DNA, 10 bp, Artificial Sequence
  Synthetic Polynucleotide
aacccctgga

SEQ ID NO: 961 - DNA, 10 bp, Artificial Sequence
  Synthetic Polynucleotide
tccgcagcca

SEQ ID NO: 962 - DNA, 10 bp, Artificial Sequence
  Synthetic Polynucleotide
ctgtagctgc

SEQ ID NO: 963 - DNA, 10 bp, Artificial Sequence
  Synthetic Polynucleotide
cagctcctca

SEQ ID NO: 964 - DNA, 10 bp, Artificial Sequence
  Synthetic Polynucleotide
tctacgcaag

SEQ ID NO: 965 - DNA, 10 bp, Artificial Sequence
  Synthetic Polynucleotide
cgcatggccc

SEQ ID NO: 966 - DNA, 10 bp, Artificial Sequence
  Synthetic Polynucleotide
ctcggtgagc

SEQ ID NO: 967 - DNA, 10 bp, Artificial Sequence
  Synthetic Polynucleotide
ccagttccgg

SEQ ID NO: 968 - DNA, 10 bp, Artificial Sequence
  Synthetic Polynucleotide
gcgagggttg

SEQ ID NO: 969 - DNA, 10 bp, Artificial Sequence
  Synthetic Polynucleotide
attccccacg

SEQ ID NO: 970 - DNA, 10 bp, Artificial Sequence
  Synthetic Polynucleotide
gtgtgggacc

SEQ ID NO: 971 - DNA, 10 bp, Artificial Sequence
  Synthetic Polynucleotide
cccaccactt

SEQ ID NO: 972 - DNA, 10 bp, Artificial Sequence
  Synthetic Polynucleotide
cgtgattgga

SEQ ID NO: 973 - DNA, 10 bp, Artificial Sequence
  Synthetic Polynucleotide
cccatctcca

SEQ ID NO: 974 - DNA, 10 bp, Artificial Sequence
  Synthetic Polynucleotide
cagcggtatc

SEQ ID NO: 975 - DNA, 10 bp, Artificial Sequence
  Synthetic Polynucleotide
cggagcatct

SEQ ID NO: 976 - DNA, 10 bp, Artificial Sequence
  Synthetic Polynucleotide
cctgggcatt

SEQ ID NO: 977 - DNA, 10 bp, Artificial Sequence
  Synthetic Polynucleotide
gctcgtcttc

SEQ ID NO: 978 - DNA, 10 bp, Artificial Sequence
  Synthetic Polynucleotide
gcagcggcag

SEQ ID NO: 979 - DNA, 10 bp, Artificial Sequence
  Synthetic Polynucleotide
gcggcaacag

SEQ ID NO: 980 - DNA, 10 bp, Artificial Sequence
  Synthetic Polynucleotide
tggagccacg

SEQ ID NO: 981 - DNA, 10 bp, Artificial Sequence
  Synthetic Polynucleotide
gaggcggagc

SEQ ID NO: 982 - DNA, 10 bp, Artificial Sequence
  Synthetic Polynucleotide
cgcgagagtt

SEQ ID NO: 983 - DNA, 10 bp, Artificial Sequence
  Synthetic Polynucleotide
cagcatggcc

SEQ ID NO: 984 - DNA, 10 bp, Artificial Sequence
  Synthetic Polynucleotide
aggagaccac

SEQ ID NO: 985 - DNA, 10 bp, Artificial Sequence
  Synthetic Polynucleotide
acggagaact

SEQ ID NO: 986 - DNA, 10 bp, Artificial Sequence
  Synthetic Polynucleotide
gacgaaagca

SEQ ID NO: 987 - DNA, 10 bp, Artificial Sequence
  Synthetic Polynucleotide
tagcgaagga

SEQ ID NO: 988 - DNA, 10 bp, Artificial Sequence
  Synthetic Polynucleotide
ttcggtggaa

SEQ ID NO: 989 - DNA, 10 bp, Artificial Sequence
  Synthetic Polynucleotide
acgagtctcc

SEQ ID NO: 990 - DNA, 10 bp, Artificial Sequence
  Synthetic Polynucleotide
gctgctcaag

SEQ ID NO: 991 - DNA, 10 bp, Artificial Sequence
  Synthetic Polynucleotide
aaccccttga

SEQ ID NO: 992 - DNA, 10 bp, Artificial Sequence
  Synthetic Polynucleotide
cggcgactga

SEQ ID NO: 993 - DNA, 10 bp, Artificial Sequence
  Synthetic Polynucleotide
ttcggcactc

SEQ ID NO: 994 - DNA, 10 bp, Artificial Sequence
  Synthetic Polynucleotide
gctgggaaga

SEQ ID NO: 995 - DNA, 10 bp, Artificial Sequence
  Synthetic Polynucleotide
tccaaccact

SEQ ID NO: 996 - DNA, 10 bp, Artificial Sequence
  Synthetic Polynucleotide
gacagcttga

SEQ ID NO: 997 - DNA, 10 bp, Artificial Sequence
  Synthetic Polynucleotide
ggacaaccac

SEQ ID NO: 998 - DNA, 10 bp, Artificial Sequence
  Synthetic Polynucleotide
tgtgtgtgtc

SEQ ID NO: 999 - DNA, 10 bp, Artificial Sequence
  Synthetic Polynucleotide
acgagagtgt

SEQ ID NO: 1000 - DNA, 10 bp, Artificial Sequence
  Synthetic Polynucleotide
tcgggcatga

SEQ ID NO: 1001 - DNA, 10 bp, Artificial Sequence
  Synthetic Polynucleotide
ttcgaggtgt

SEQ ID NO: 1002 - DNA, 10 bp, Artificial Sequence
  Synthetic Polynucleotide
tagaggcgga

SEQ ID NO: 1003 - DNA, 10 bp, Artificial Sequence
  Synthetic Polynucleotide
tcacgacgat

SEQ ID NO: 1004 - DNA, 10 bp, Artificial Sequence
  Synthetic Polynucleotide
tcggagtgtg

SEQ ID NO: 1005 - DNA, 10 bp, Artificial Sequence
  Synthetic Polynucleotide
taccgccacc

SEQ ID NO: 1006 - DNA, 10 bp, Artificial Sequence
  Synthetic Polynucleotide
gatgggttgg

SEQ ID NO: 1007 - DNA, 10 bp, Artificial Sequence
  Synthetic Polynucleotide
agtctgcgta

SEQ ID NO: 1008 - DNA, 10 bp, Artificial Sequence
  Synthetic Polynucleotide
gctggatgta

SEQ ID NO: 1009 - DNA, 10 bp, Artificial Sequence
  Synthetic Polynucleotide
aaccaggtca

SEQ ID NO: 1010 - DNA, 10 bp, Artificial Sequence
  Synthetic Polynucleotide
ggagtttccg

SEQ ID NO: 1011 - DNA, 10 bp, Artificial Sequence
  Synthetic Polynucleotide
caaatcgcca

SEQ ID NO: 1012 - DNA, 10 bp, Artificial Sequence
  Synthetic Polynucleotide
atggggatga

SEQ ID NO: 1013 - DNA, 10 bp, Artificial Sequence
  Synthetic Polynucleotide
gtcaccacac

SEQ ID NO: 1014 - DNA, 10 bp, Artificial Sequence
  Synthetic Polynucleotide
gaggagggtt

SEQ ID NO: 1015 - DNA, 10 bp, Artificial Sequence
  Synthetic Polynucleotide
gaggtttgca

SEQ ID NO: 1016 - DNA, 10 bp, Artificial Sequence
  Synthetic Polynucleotide
gcagaacacc

SEQ ID NO: 1017 - DNA, 10 bp, Artificial Sequence
  Synthetic Polynucleotide
ttttccgggt

SEQ ID NO: 1018 - DNA, 10 bp, Artificial Sequence
  Synthetic Polynucleotide
cagctttcgt

SEQ ID NO: 1019 - DNA, 10 bp, Artificial Sequence
  Synthetic Polynucleotide
gcgctatcct

SEQ ID NO: 1020 - DNA, 10 bp, Artificial Sequence
  Synthetic Polynucleotide
aggtaacgcc

SEQ ID NO: 1021 - DNA, 10 bp, Artificial Sequence
  Synthetic Polynucleotide
catccgagga

SEQ ID NO: 1022 - DNA, 10 bp, Artificial Sequence
  Synthetic Polynucleotide
gttcgcttca

SEQ ID NO: 1023 - DNA, 10 bp, Artificial Sequence
  Synthetic Polynucleotide
ggcagcagaa

SEQ ID NO: 1024 - DNA, 10 bp, Artificial Sequence
  Synthetic Polynucleotide
taggcaggtc

SEQ ID NO: 1025 - DNA, 10 bp, Artificial Sequence
  Synthetic Polynucleotide
ctgtcgccac

SEQ ID NO: 1026 - DNA, 10 bp, Artificial Sequence
  Synthetic Polynucleotide
tggtactggg

SEQ ID NO: 1027 - DNA, 10 bp, Artificial Sequence
  Synthetic Polynucleotide
ccccaatgtc

SEQ ID NO: 1028 - DNA, 10 bp, Artificial Sequence
  Synthetic Polynucleotide
tgggcacgtt

SEQ ID NO: 1029 - DNA, 10 bp, Artificial Sequence
  Synthetic Polynucleotide
gcacagacta

SEQ ID NO: 1030 - DNA, 10 bp, Artificial Sequence
  Synthetic Polynucleotide
gaggcacaag

SEQ ID NO: 1031 - DNA, 10 bp, Artificial Sequence
  Synthetic Polynucleotide
tcctccttca

SEQ ID NO: 1032 - DNA, 10 bp, Artificial Sequence
  Synthetic Polynucleotide
gtggtcctga

SEQ ID NO: 1033 - DNA, 10 bp, Artificial Sequence
  Synthetic Polynucleotide
atcgccactg

SEQ ID NO: 1034 - DNA, 10 bp, Artificial Sequence
  Synthetic Polynucleotide
cgcttgacag

SEQ ID NO: 1035 - DNA, 10 bp, Artificial Sequence
  Synthetic Polynucleotide
cagcacagag

SEQ ID NO: 1036 - DNA, 10 bp, Artificial Sequence
  Synthetic Polynucleotide
ggttgccgca

SEQ ID NO: 1037 - DNA, 10 bp, Artificial Sequence
  Synthetic Polynucleotide
aacaggagct

SEQ ID NO: 1038 - DNA, 10 bp, Artificial Sequence
  Synthetic Polynucleotide
gctgcttgga

SEQ ID NO: 1039 - DNA, 10 bp, Artificial Sequence
  Synthetic Polynucleotide
tttccgcatc

SEQ ID NO: 1040 - DNA, 10 bp, Artificial Sequence
  Synthetic Polynucleotide
tgcacagagt

SEQ ID NO: 1041 - DNA, 10 bp, Artificial Sequence
  Synthetic Polynucleotide
gcgcattttg

SEQ ID NO: 1042 - DNA, 10 bp, Artificial Sequence
  Synthetic Polynucleotide
ggaggttgtg

SEQ ID NO: 1043 - DNA, 10 bp, Artificial Sequence
  Synthetic Polynucleotide
ctgcacgagc

SEQ ID NO: 1044 - DNA, 10 bp, Artificial Sequence
  Synthetic Polynucleotide
tgccaaacgc

SEQ ID NO: 1045 - DNA, 10 bp, Artificial Sequence
  Synthetic Polynucleotide
atctggtccc

SEQ ID NO: 1046 - DNA, 10 bp, Artificial Sequence
  Synthetic Polynucleotide
ggaccttggt

SEQ ID NO: 1047 - DNA, 10 bp, Artificial Sequence
  Synthetic Polynucleotide
cggttgtggg

SEQ ID NO: 1048 - DNA, 10 bp, Artificial Sequence
  Synthetic Polynucleotide
agtgtggtcg

SEQ ID NO: 1049 - DNA, 10 bp, Artificial Sequence
  Synthetic Polynucleotide
tgtgatgccc

SEQ ID NO: 1050 - DNA, 10 bp, Artificial Sequence
  Synthetic Polynucleotide
gacaggacga

SEQ ID NO: 1051 - DNA, 10 bp, Artificial Sequence
  Synthetic Polynucleotide
cagcttgaca

SEQ ID NO: 1052 - DNA, 10 bp, Artificial Sequence
  Synthetic Polynucleotide
atgggttggg

SEQ ID NO: 1053 - DNA, 10 bp, Artificial Sequence
  Synthetic Polynucleotide
gcatcaccac

SEQ ID NO: 1054 - DNA, 10 bp, Artificial Sequence
  Synthetic Polynucleotide
gcaccaccaa

SEQ ID NO: 1055 - DNA, 10 bp, Artificial Sequence
  Synthetic Polynucleotide
tccacacacc

SEQ ID NO: 1056 - DNA, 10 bp, Artificial Sequence
  Synthetic Polynucleotide
gcttacgcaa

SEQ ID NO: 1057 - DNA, 10 bp, Artificial Sequence
  Synthetic Polynucleotide
accacctggc

SEQ ID NO: 1058 - DNA, 10 bp, Artificial Sequence
  Synthetic Polynucleotide
gcttcaccac

SEQ ID NO: 1059 - DNA, 10 bp, Artificial Sequence
  Synthetic Polynucleotide
ctgtggctgt

SEQ ID NO: 1060 - DNA, 10 bp, Artificial Sequence
  Synthetic Polynucleotide
tcatggcacc

SEQ ID NO: 1061 - DNA, 10 bp, Artificial Sequence
  Synthetic Polynucleotide
ggtcgttcta

SEQ ID NO: 1062 - DNA, 10 bp, Artificial Sequence
  Synthetic Polynucleotide
ttcgtcgcaa

SEQ ID NO: 1063 - DNA, 10 bp, Artificial Sequence
  Synthetic Polynucleotide
ccgtgcattt

SEQ ID NO: 1064 - DNA, 10 bp, Artificial Sequence
  Synthetic Polynucleotide
gccccacaaa

SEQ ID NO: 1065 - DNA, 10 bp, Artificial Sequence
  Synthetic Polynucleotide
gggtgcttgc

SEQ ID NO: 1066 - DNA, 10 bp, Artificial Sequence
  Synthetic Polynucleotide
gcagcgaatc

SEQ ID NO: 1067 - DNA, 10 bp, Artificial Sequence
  Synthetic Polynucleotide
tgccttcggg

SEQ ID NO: 1068 - DNA, 10 bp, Artificial Sequence
  Synthetic Polynucleotide
cgatgaccag

SEQ ID NO: 1069 - DNA, 10 bp, Artificial Sequence
  Synthetic Polynucleotide
catcgcctac

SEQ ID NO: 1070 - DNA, 10 bp, Artificial Sequence
  Synthetic Polynucleotide
gatctcgtcg

SEQ ID NO: 1071 - DNA, 10 bp, Artificial Sequence
  Synthetic Polynucleotide
gctggcaacc

SEQ ID NO: 1072 - DNA, 10 bp, Artificial Sequence
  Synthetic Polynucleotide
cgtgatgtcc

SEQ ID NO: 1073 - DNA, 10 bp, Artificial Sequence
  Synthetic Polynucleotide
ccaccatcgc

SEQ ID NO: 1074 - DNA, 10 bp, Artificial Sequence
  Synthetic Polynucleotide
tcatctccgc

SEQ ID NO: 1075 - DNA, 10 bp, Artificial Sequence
  Synthetic Polynucleotide
gttcatcgcg

SEQ ID NO: 1076 - DNA, 10 bp, Artificial Sequence
  Synthetic Polynucleotide
cacactgacg

SEQ ID NO: 1077 - DNA, 10 bp, Artificial Sequence
  Synthetic Polynucleotide
gcgttgggcc

SEQ ID NO: 1078 - DNA, 10 bp, Artificial Sequence
  Synthetic Polynucleotide
gcttcagcat

SEQ ID NO: 1079 - DNA, 10 bp, Artificial Sequence
  Synthetic Polynucleotide
gtaccgccgg

SEQ ID NO: 1080 - DNA, 10 bp, Artificial Sequence
  Synthetic Polynucleotide
agctgttcct

SEQ ID NO: 1081 - DNA, 10 bp, Artificial Sequence
  Synthetic Polynucleotide
tggttaccca

SEQ ID NO: 1082 - DNA, 10 bp, Artificial Sequence
  Synthetic Polynucleotide
gattgccaga

SEQ ID NO: 1083 - DNA, 10 bp, Artificial Sequence
  Synthetic Polynucleotide
atgagcgacg

SEQ ID NO: 1084 - DNA, 10 bp, Artificial Sequence
  Synthetic Polynucleotide
tctgttgggt

SEQ ID NO: 1085 - DNA, 10 bp, Artificial Sequence
  Synthetic Polynucleotide
gcagcaaaca

SEQ ID NO: 1086 - DNA, 10 bp, Artificial Sequence
  Synthetic Polynucleotide
aagtgagccc

SEQ ID NO: 1087 - DNA, 10 bp, Artificial Sequence
  Synthetic Polynucleotide
ctcctttggc

SEQ ID NO: 1088 - DNA, 10 bp, Artificial Sequence
  Synthetic Polynucleotide
tagcgtcaaa

SEQ ID NO: 1089 - DNA, 10 bp, Artificial Sequence
  Synthetic Polynucleotide
gcgatgccca

SEQ ID NO: 1090 - DNA, 10 bp, Artificial Sequence
  Synthetic Polynucleotide
cagttgggtc

SEQ ID NO: 1091 - DNA, 10 bp, Artificial Sequence
  Synthetic Polynucleotide
cgattcgaca

SEQ ID NO: 1092 - DNA, 10 bp, Artificial Sequence
  Synthetic Polynucleotide
tcaccagcga

SEQ ID NO: 1093 - DNA, 10 bp, Artificial Sequence
  Synthetic Polynucleotide
aggctacccc

SEQ ID NO: 1094 - DNA, 10 bp, Artificial Sequence
  Synthetic Polynucleotide
ctgccaatgc

SEQ ID NO: 1095 - DNA, 10 bp, Artificial Sequence
  Synthetic Polynucleotide
tctcggtaga

SEQ ID NO: 1096 - DNA, 10 bp, Artificial Sequence
  Synthetic Polynucleotide
ctctcgatgc

SEQ ID NO: 1097 - DNA, 10 bp, Artificial Sequence
  Synthetic Polynucleotide
aagacgtgct

SEQ ID NO: 1098 - DNA, 10 bp, Artificial Sequence
  Synthetic Polynucleotide
cacgaaggtc

SEQ ID NO: 1099 - DNA, 10 bp, Artificial Sequence
  Synthetic Polynucleotide
aggtggtctc

SEQ ID NO: 1100 - DNA, 10 bp, Artificial Sequence
  Synthetic Polynucleotide
tctggctgag

SEQ ID NO: 1101 - DNA, 10 bp, Artificial Sequence
  Synthetic Polynucleotide
acattggctg

SEQ ID NO: 1102 - DNA, 10 bp, Artificial Sequence
  Synthetic Polynucleotide
tggagttgct

SEQ ID NO: 1103 - DNA, 10 bp, Artificial Sequence
  Synthetic Polynucleotide
tggcaatcag

SEQ ID NO: 1104 - DNA, 10 bp, Artificial Sequence
  Synthetic Polynucleotide
gcatttgggt

SEQ ID NO: 1105 - DNA, 10 bp, Artificial Sequence
  Synthetic Polynucleotide
atctccacga

SEQ ID NO: 1106 - DNA, 10 bp, Artificial Sequence
  Synthetic Polynucleotide
ggggtctcct

SEQ ID NO: 1107 - DNA, 10 bp, Artificial Sequence
  Synthetic Polynucleotide
aagtcaggcc

SEQ ID NO: 1108 - DNA, 10 bp, Artificial Sequence
  Synthetic Polynucleotide
ggcagtacca

SEQ ID NO: 1109 - DNA, 10 bp, Artificial Sequence
  Synthetic Polynucleotide
tggcgttagt

SEQ ID NO: 1110 - DNA, 10 bp, Artificial Sequence
  Synthetic Polynucleotide
cagggcattc

SEQ ID NO: 1111 - DNA, 10 bp, Artificial Sequence
  Synthetic Polynucleotide
gaacaagccc

SEQ ID NO: 1112 - DNA, 10 bp, Artificial Sequence
  Synthetic Polynucleotide
tccatgtgcc

SEQ ID NO: 1113 - DNA, 10 bp, Artificial Sequence
  Synthetic Polynucleotide
gtggacgagg

SEQ ID NO: 1114 - DNA, 10 bp, Artificial Sequence
  Synthetic Polynucleotide
ccagccacat

SEQ ID NO: 1115 - DNA, 10 bp, Artificial Sequence
  Synthetic Polynucleotide
tggcaatgac

SEQ ID NO: 1116 - DNA, 10 bp, Artificial Sequence
  Synthetic Polynucleotide
ccagtcctcc

SEQ ID NO: 1117 - DNA, 10 bp, Artificial Sequence
  Synthetic Polynucleotide
agacggtgct

SEQ ID NO: 1118 - DNA, 10 bp, Artificial Sequence
  Synthetic Polynucleotide
cacccgaagg

SEQ ID NO: 1119 - DNA, 10 bp, Artificial Sequence
  Synthetic Polynucleotide
taaatcccgg

SEQ ID NO: 1120 - DNA, 10 bp, Artificial Sequence
  Synthetic Polynucleotide
tcaccacaca

SEQ ID NO: 1121 - DNA, 10 bp, Artificial Sequence
  Synthetic Polynucleotide
gctgggacac

SEQ ID NO: 1122 - DNA, 10 bp, Artificial Sequence
  Synthetic Polynucleotide
taggggcaag

SEQ ID NO: 1123 - DNA, 10 bp, Artificial Sequence
  Synthetic Polynucleotide
ggagaggtgg

SEQ ID NO: 1124 - DNA, 10 bp, Artificial Sequence
  Synthetic Polynucleotide
atccacaccc

SEQ ID NO: 1125 - DNA, 10 bp, Artificial Sequence
  Synthetic Polynucleotide
tctgctccca

SEQ ID NO: 1126 - DNA, 10 bp, Artificial Sequence
  Synthetic Polynucleotide
tgtccaaggc

SEQ ID NO: 1127 - DNA, 10 bp, Artificial Sequence
  Synthetic Polynucleotide
gcaaaggaga

SEQ ID NO: 1128 - DNA, 10 bp, Artificial Sequence
  Synthetic Polynucleotide
tccaatgtgc

SEQ ID NO: 1129 - DNA, 10 bp, Artificial Sequence
  Synthetic Polynucleotide
tgtgtcatgc

SEQ ID NO: 1130 - DNA, 10 bp, Artificial Sequence
  Synthetic Polynucleotide
tgtcccatcc

SEQ ID NO: 1131 - DNA, 10 bp, Artificial Sequence
  Synthetic Polynucleotide
acatgtggct

SEQ ID NO: 1132 - DNA, 10 bp, Artificial Sequence
  Synthetic Polynucleotide
atcgtcacca

SEQ ID NO: 1133 - DNA, 10 bp, Artificial Sequence
  Synthetic Polynucleotide
ttctgggcga

SEQ ID NO: 1134 - DNA, 10 bp, Artificial Sequence
  Synthetic Polynucleotide
tggtcatcca

SEQ ID NO: 1135 - DNA, 10 bp, Artificial Sequence
  Synthetic Polynucleotide
agtgggaaga

SEQ ID NO: 1136 - DNA, 10 bp, Artificial Sequence
  Synthetic Polynucleotide
taggacctgt

SEQ ID NO: 1137 - DNA, 10 bp, Artificial Sequence
  Synthetic Polynucleotide
ggcttggtta

SEQ ID NO: 1138 - DNA, 10 bp, Artificial Sequence
  Synthetic Polynucleotide
acgatgctgc

SEQ ID NO: 1139 - DNA, 10 bp, Artificial Sequence
  Synthetic Polynucleotide
aacctggagg

SEQ ID NO: 1140 - DNA, 10 bp, Artificial Sequence
  Synthetic Polynucleotide
aagtggcagc

SEQ ID NO: 1141 - DNA, 10 bp, Artificial Sequence
  Synthetic Polynucleotide
aatgccaggt

SEQ ID NO: 1142 - DNA, 10 bp, Artificial Sequence
  Synthetic Polynucleotide
tgagcacctc

SEQ ID NO: 1143 - DNA, 10 bp, Artificial Sequence
  Synthetic Polynucleotide
ttgcccaaag

SEQ ID NO: 1144 - DNA, 10 bp, Artificial Sequence
  Synthetic Polynucleotide
acttcctcga

SEQ ID NO: 1145 - DNA, 10 bp, Artificial Sequence
  Synthetic Polynucleotide
acactcccga

SEQ ID NO: 1146 - DNA, 10 bp, Artificial Sequence
  Synthetic Polynucleotide
ggctttgagg

SEQ ID NO: 1147 - DNA, 10 bp, Artificial Sequence
  Synthetic Polynucleotide
tgccctctca

SEQ ID NO: 1148 - DNA, 10 bp, Artificial Sequence
  Synthetic Polynucleotide
ccgtccctgt

SEQ ID NO: 1149 - DNA, 10 bp, Artificial Sequence
  Synthetic Polynucleotide
tggacgagta

SEQ ID NO: 1150 - DNA, 10 bp, Artificial Sequence
  Synthetic Polynucleotide
acccagcctt

SEQ ID NO: 1151 - DNA, 10 bp, Artificial Sequence
  Synthetic Polynucleotide
gcagcctttg

SEQ ID NO: 1152 - DNA, 10 bp, Artificial Sequence
  Synthetic Polynucleotide
cagtgttggc

SEQ ID NO: 1153 - DNA, 10 bp, Artificial Sequence
  Synthetic Polynucleotide
tgggtcaaga

SEQ ID NO: 1154 - DNA, 10 bp, Artificial Sequence
  Synthetic Polynucleotide
tcgcagttga

SEQ ID NO: 1155 - DNA, 10 bp, Artificial Sequence
  Synthetic Polynucleotide
ccaccatcga

SEQ ID NO: 1156 - DNA, 10 bp, Artificial Sequence
  Synthetic Polynucleotide
tcgtttgtgt

SEQ ID NO: 1157 - DNA, 10 bp, Artificial Sequence
  Synthetic Polynucleotide
caacaggcaa

SEQ ID NO: 1158 - DNA, 10 bp, Artificial Sequence
  Synthetic Polynucleotide
ggtccctcgc

SEQ ID NO: 1159 - DNA, 10 bp, Artificial Sequence
  Synthetic Polynucleotide
tcgccttggt

SEQ ID NO: 1160 - DNA, 10 bp, Artificial Sequence
  Synthetic Polynucleotide
tgtgacccct

SEQ ID NO: 1161 - DNA, 10 bp, Artificial Sequence
  Synthetic Polynucleotide
ggtgagaggc

SEQ ID NO: 1162 - DNA, 10 bp, Artificial Sequence
  Synthetic Polynucleotide
aggtagccgc

SEQ ID NO: 1163 - DNA, 10 bp, Artificial Sequence
  Synthetic Polynucleotide
ccttcgacca

SEQ ID NO: 1164 - DNA, 10 bp, Artificial Sequence
  Synthetic Polynucleotide
acccgcagaa

SEQ ID NO: 1165 - DNA, 10 bp, Artificial Sequence
  Synthetic Polynucleotide
acacggaatg

SEQ ID NO: 1166 - DNA, 10 bp, Artificial Sequence
  Synthetic Polynucleotide
catcagggca

SEQ ID NO: 1167 - DNA, 10 bp, Artificial Sequence
  Synthetic Polynucleotide
ggtcaagcgc

SEQ ID NO: 1168 - DNA, 10 bp, Artificial Sequence
  Synthetic Polynucleotide
tcacctcagt

SEQ ID NO: 1169 - DNA, 10 bp, Artificial Sequence
  Synthetic Polynucleotide
tgggctttca

SEQ ID NO: 1170 - DNA, 10 bp, Artificial Sequence
  Synthetic Polynucleotide
gtgggaggct

SEQ ID NO: 1171 - DNA, 10 bp, Artificial Sequence
  Synthetic Polynucleotide
tttgctgcct

SEQ ID NO: 1172 - DNA, 10 bp, Artificial Sequence
  Synthetic Polynucleotide
ctcgccttgg

SEQ ID NO: 1173 - DNA, 10 bp, Artificial Sequence
  Synthetic Polynucleotide
tgacgagagc

SEQ ID NO: 1174 - DNA, 10 bp, Artificial Sequence
  Synthetic Polynucleotide
tcaggcatga

SEQ ID NO: 1175 - DNA, 10 bp, Artificial Sequence
  Synthetic Polynucleotide
tcgcagaagg

SEQ ID NO: 1176 - DNA, 10 bp, Artificial Sequence
  Synthetic Polynucleotide
aggtccagac

SEQ ID NO: 1177 - DNA, 10 bp, Artificial Sequence
  Synthetic Polynucleotide
cttgggaggc

SEQ ID NO: 1178 - DNA, 10 bp, Artificial Sequence
  Synthetic Polynucleotide
tccagcacga

SEQ ID NO: 1179 - DNA, 10 bp, Artificial Sequence
  Synthetic Polynucleotide
tgggtgatgg

SEQ ID NO: 1180 - DNA, 10 bp, Artificial Sequence
  Synthetic Polynucleotide
acagggacgg

SEQ ID NO: 1181 - DNA, 10 bp, Artificial Sequence
  Synthetic Polynucleotide
ggcttcaccg

SEQ ID NO: 1182 - DNA, 10 bp, Artificial Sequence
  Synthetic Polynucleotide
aagctggtca

SEQ ID NO: 1183 - DNA, 10 bp, Artificial Sequence
  Synthetic Polynucleotide
ttgtttgggc

SEQ ID NO: 1184 - DNA, 10 bp, Artificial Sequence
  Synthetic Polynucleotide
cacaatgcga

SEQ ID NO: 1185 - DNA, 10 bp, Artificial Sequence
  Synthetic Polynucleotide
ggcagttgga

SEQ ID NO: 1186 - DNA, 10 bp, Artificial Sequence
  Synthetic Polynucleotide
cacagcaact

SEQ ID NO: 1187 - DNA, 10 bp, Artificial Sequence
  Synthetic Polynucleotide
tggcttggtg

SEQ ID NO: 1188 - DNA, 10 bp, Artificial Sequence
  Synthetic Polynucleotide
aagctcacct

SEQ ID NO: 1189 - DNA, 10 bp, Artificial Sequence
  Synthetic Polynucleotide
gcttcaccag

SEQ ID NO: 1190 - DNA, 10 bp, Artificial Sequence
  Synthetic Polynucleotide
caactctgca

SEQ ID NO: 1191 - DNA, 10 bp, Artificial Sequence
  Synthetic Polynucleotide
gccacagttg

SEQ ID NO: 1192 - DNA, 10 bp, Artificial Sequence
  Synthetic Polynucleotide
agagcactgc

SEQ ID NO: 1193 - DNA, 10 bp, Artificial Sequence
  Synthetic Polynucleotide
agtgggcatg

SEQ ID NO: 1194 - DNA, 10 bp, Artificial Sequence
  Synthetic Polynucleotide
cgcacacaca

SEQ ID NO: 1195 - DNA, 10 bp, Artificial Sequence
  Synthetic Polynucleotide
ggcacggtaa

SEQ ID NO: 1196 - DNA, 10 bp, Artificial Sequence
  Synthetic Polynucleotide
caagcgtctg

SEQ ID NO: 1197 - DNA, 10 bp, Artificial Sequence
  Synthetic Polynucleotide
tctcccctct

SEQ ID NO: 1198 - DNA, 10 bp, Artificial Sequence
  Synthetic Polynucleotide
tgccgtctcg

SEQ ID NO: 1199 - DNA, 10 bp, Artificial Sequence
  Synthetic Polynucleotide
cagaggcgta

SEQ ID NO: 1200 - DNA, 10 bp, Artificial Sequence
  Synthetic Polynucleotide
cgtcacatgg

SEQ ID NO: 1201 - DNA, 10 bp, Artificial Sequence
  Synthetic Polynucleotide
gctactgcct

SEQ ID NO: 1202 - DNA, 10 bp, Artificial Sequence
  Synthetic Polynucleotide
aggtggcaaa

SEQ ID NO: 1203 - DNA, 10 bp, Artificial Sequence
  Synthetic Polynucleotide
tacatgggcc

SEQ ID NO: 1204 - DNA, 10 bp, Artificial Sequence
  Synthetic Polynucleotide
ccggatggcc

SEQ ID NO: 1205 - DNA, 10 bp, Artificial Sequence
  Synthetic Polynucleotide
gcaatccagg

SEQ ID NO: 1206 - DNA, 10 bp, Artificial Sequence
  Synthetic Polynucleotide
cccctgtgcg

SEQ ID NO: 1207 - DNA, 10 bp, Artificial Sequence
  Synthetic Polynucleotide
acgaagcgat

SEQ ID NO: 1208 - DNA, 10 bp, Artificial Sequence
  Synthetic Polynucleotide
taccacttcg

SEQ ID NO: 1209 - DNA, 10 bp, Artificial Sequence
  Synthetic Polynucleotide
ggctgtcgaa

SEQ ID NO: 1210 - DNA, 10 bp, Artificial Sequence
  Synthetic Polynucleotide
tgtgggatcc

SEQ ID NO: 1211 - DNA, 10 bp, Artificial Sequence
  Synthetic Polynucleotide
gcgttcttgc

SEQ ID NO: 1212 - DNA, 10 bp, Artificial Sequence
  Synthetic Polynucleotide
tcaaacgtgt

SEQ ID NO: 1213 - DNA, 10 bp, Artificial Sequence
  Synthetic Polynucleotide
acgggaagcc

SEQ ID NO: 1214 - DNA, 10 bp, Artificial Sequence
  Synthetic Polynucleotide
tgcagtgatg

SEQ ID NO: 1215 - DNA, 10 bp, Artificial Sequence
  Synthetic Polynucleotide
acatctgcgg

SEQ ID NO: 1216 - DNA, 10 bp, Artificial Sequence
  Synthetic Polynucleotide
atgtcgtcga

SEQ ID NO: 1217 - DNA, 10 bp, Artificial Sequence
  Synthetic Polynucleotide
gccaagttca

SEQ ID NO: 1218 - DNA, 10 bp, Artificial Sequence
  Synthetic Polynucleotide
tcaattgggc

SEQ ID NO: 1219 - DNA, 10 bp, Artificial Sequence
  Synthetic Polynucleotide
cggatggccg

SEQ ID NO: 1220 - DNA, 10 bp, Artificial Sequence
  Synthetic Polynucleotide
ggacaccagg

SEQ ID NO: 1221 - DNA, 10 bp, Artificial Sequence
  Synthetic Polynucleotide
caatgtgggc

SEQ ID NO: 1222 - DNA, 10 bp, Artificial Sequence
  Synthetic Polynucleotide
ggcgttcttg

SEQ ID NO: 1223 - DNA, 10 bp, Artificial Sequence
  Synthetic Polynucleotide
ggtgcaagga

SEQ ID NO: 1224 - DNA, 10 bp, Artificial Sequence
  Synthetic Polynucleotide
catttgccca

SEQ ID NO: 1225 - DNA, 10 bp, Artificial Sequence
  Synthetic Polynucleotide
ttgtagccca

SEQ ID NO: 1226 - DNA, 10 bp, Artificial Sequence
  Synthetic Polynucleotide
gcacgacaca

SEQ ID NO: 1227 - DNA, 10 bp, Artificial Sequence
  Synthetic Polynucleotide
ccttgcatcc

SEQ ID NO: 1228 - DNA, 10 bp, Artificial Sequence
  Synthetic Polynucleotide
atcgaccaca

SEQ ID NO: 1229 - DNA, 10 bp, Artificial Sequence
  Synthetic Polynucleotide
tcgactctgt

SEQ ID NO: 1230 - DNA, 10 bp, Artificial Sequence
  Synthetic Polynucleotide
ggcaacaggt

SEQ ID NO: 1231 - DNA, 10 bp, Artificial Sequence
  Synthetic Polynucleotide
ttgaggccca

SEQ ID NO: 1232 - DNA, 10 bp, Artificial Sequence
  Synthetic Polynucleotide
tccttggaga

SEQ ID NO: 1233 - DNA, 10 bp, Artificial Sequence
  Synthetic Polynucleotide
taagcgatgt

SEQ ID NO: 1234 - DNA, 10 bp, Artificial Sequence
  Synthetic Polynucleotide
accctggaca

SEQ ID NO: 1235 - DNA, 10 bp, Artificial Sequence
  Synthetic Polynucleotide
tccagaagga

SEQ ID NO: 1236 - DNA, 10 bp, Artificial Sequence
  Synthetic Polynucleotide
ttcaccacga

SEQ ID NO: 1237 - DNA, 10 bp, Artificial Sequence
  Synthetic Polynucleotide
cggaggagct

SEQ ID NO: 1238 - DNA, 10 bp, Artificial Sequence
  Synthetic Polynucleotide
accatgtgca

SEQ ID NO: 1239 - DNA, 10 bp, Artificial Sequence
  Synthetic Polynucleotide
cggatggccg

SEQ ID NO: 1240 - DNA, 10 bp, Artificial Sequence
  Synthetic Polynucleotide
agaatggcgt

SEQ ID NO: 1241 - DNA, 10 bp, Artificial Sequence
  Synthetic Polynucleotide
caggttgtgg

SEQ ID NO: 1242 - DNA, 10 bp, Artificial Sequence
  Synthetic Polynucleotide
gcaccaacag

SEQ ID NO: 1243 - DNA, 10 bp, Artificial Sequence
  Synthetic Polynucleotide
gcccatgact

SEQ ID NO: 1244 - DNA, 10 bp, Artificial Sequence
  Synthetic Polynucleotide
gatgcggact

SEQ ID NO: 1245 - DNA, 10 bp, Artificial Sequence
  Synthetic Polynucleotide
aggcgtttta

SEQ ID NO: 1246 - DNA, 10 bp, Artificial Sequence
  Synthetic Polynucleotide
aggccctgct

SEQ ID NO: 1247 - DNA, 10 bp, Artificial Sequence
  Synthetic Polynucleotide
tgcctaagcg

SEQ ID NO: 1248 - DNA, 10 bp, Artificial Sequence
  Synthetic Polynucleotide
ttccatccga

SEQ ID NO: 1249 - DNA, 10 bp, Artificial Sequence
  Synthetic Polynucleotide
gcccacatgg

SEQ ID NO: 1250 - DNA, 10 bp, Artificial Sequence
  Synthetic Polynucleotide
ccggagccat

SEQ ID NO: 1251 - DNA, 10 bp, Artificial Sequence
  Synthetic Polynucleotide
ttcgaccgtg

SEQ ID NO: 1252 - DNA, 10 bp, Artificial Sequence
  Synthetic Polynucleotide
ggcccaagcc

SEQ ID NO: 1253 - DNA, 10 bp, Artificial Sequence
  Synthetic Polynucleotide
acccgattgt

SEQ ID NO: 1254 - DNA, 10 bp, Artificial Sequence
  Synthetic Polynucleotide
aagactgcca

SEQ ID NO: 1255 - DNA, 10 bp, Artificial Sequence
  Synthetic Polynucleotide
taggtccagg

SEQ ID NO: 1256 - DNA, 10 bp, Artificial Sequence
  Synthetic Polynucleotide
caagctgcac

SEQ ID NO: 1257 - DNA, 10 bp, Artificial Sequence
  Synthetic Polynucleotide
gccgatactg

SEQ ID NO: 1258 - DNA, 10 bp, Artificial Sequence
  Synthetic Polynucleotide
tatcacgccc

SEQ ID NO: 1259 - DNA, 10 bp, Artificial Sequence
  Synthetic Polynucleotide
ggtcgtggct

SEQ ID NO: 1260 - DNA, 10 bp, Artificial Sequence
  Synthetic Polynucleotide
caacggggta

SEQ ID NO: 1261 - DNA, 10 bp, Artificial Sequence
  Synthetic Polynucleotide
ttcccatccc

SEQ ID NO: 1262 - DNA, 10 bp, Artificial Sequence
  Synthetic Polynucleotide
ggagaggggt

SEQ ID NO: 1263 - DNA, 10 bp, Artificial Sequence
  Synthetic Polynucleotide
atcctgctga

SEQ ID NO: 1264 - DNA, 10 bp, Artificial Sequence
  Synthetic Polynucleotide
gcctacagcc

SEQ ID NO: 1265 - DNA, 10 bp, Artificial Sequence
  Synthetic Polynucleotide
catggctgct

SEQ ID NO: 1266 - DNA, 10 bp, Artificial Sequence
  Synthetic Polynucleotide
accacagcat

SEQ ID NO: 1267 - DNA, 10 bp, Artificial Sequence
  Synthetic Polynucleotide
tggaggccca

SEQ ID NO: 1268 - DNA, 10 bp, Artificial Sequence
  Synthetic Polynucleotide
caacaccagc

SEQ ID NO: 1269 - DNA, 10 bp, Artificial Sequence
  Synthetic Polynucleotide
tatctgcgtg

SEQ ID NO: 1270 - DNA, 10 bp, Artificial Sequence
  Synthetic Polynucleotide
gacggggacg

SEQ ID NO: 1271 - DNA, 10 bp, Artificial Sequence
  Synthetic Polynucleotide
gtcctcgtcc

SEQ ID NO: 1272 - DNA, 10 bp, Artificial Sequence
  Synthetic Polynucleotide
ccaccaccac

SEQ ID NO: 1273 - DNA, 10 bp, Artificial Sequence
  Synthetic Polynucleotide
ggtggtggtg

SEQ ID NO: 1274 - DNA, 10 bp, Artificial Sequence
  Synthetic Polynucleotide
agcctgggag

SEQ ID NO: 1275 - DNA, 10 bp, Artificial Sequence
  Synthetic Polynucleotide
ctctacggcg

SEQ ID NO: 1276 - DNA, 10 bp, Artificial Sequence
  Synthetic Polynucleotide
cctgctgggc

SEQ ID NO: 1277 - DNA, 10 bp, Artificial Sequence
  Synthetic Polynucleotide
ccagcagcgc

SEQ ID NO: 1278 - DNA, 10 bp, Artificial Sequence
  Synthetic Polynucleotide
ggcctgggtg

SEQ ID NO: 1279 - DNA, 10 bp, Artificial Sequence
  Synthetic Polynucleotide
ctggagaacg

SEQ ID NO: 1280 - DNA, 10 bp, Artificial Sequence
  Synthetic Polynucleotide
gttcgacgcc

SEQ ID NO: 1281 - DNA, 10 bp, Artificial Sequence
  Synthetic Polynucleotide
agctcctcct

SEQ ID NO: 1282 - DNA, 10 bp, Artificial Sequence
  Synthetic Polynucleotide
acttgtgcca

SEQ ID NO: 1283 - DNA, 10 bp, Artificial Sequence
  Synthetic Polynucleotide
gtggaatggg

SEQ ID NO: 1284 - DNA, 10 bp, Artificial Sequence
  Synthetic Polynucleotide
gccatcgctt

SEQ ID NO: 1285 - DNA, 10 bp, Artificial Sequence
  Synthetic Polynucleotide
ggccacggtt

SEQ ID NO: 1286 - DNA, 10 bp, Artificial Sequence
  Synthetic Polynucleotide
aaacatgggc

SEQ ID NO: 1287 - DNA, 10 bp, Artificial Sequence
  Synthetic Polynucleotide
ttgtcatgcg

SEQ ID NO: 1288 - DNA, 10 bp, Artificial Sequence
  Synthetic Polynucleotide
agtctgcggt

SEQ ID NO: 1289 - DNA, 10 bp, Artificial Sequence
  Synthetic Polynucleotide
cgtgttcgct

SEQ ID NO: 1290 - DNA, 10 bp, Artificial Sequence
  Synthetic Polynucleotide
cgatggctcc

SEQ ID NO: 1291 - DNA, 10 bp, Artificial Sequence
  Synthetic Polynucleotide
gagtggacca

SEQ ID NO: 1292 - DNA, 10 bp, Artificial Sequence
  Synthetic Polynucleotide
ggccaccacc

SEQ ID NO: 1293 - DNA, 10 bp, Artificial Sequence
  Synthetic Polynucleotide
catccgctac

SEQ ID NO: 1294 - DNA, 10 bp, Artificial Sequence
  Synthetic Polynucleotide
actcacccac

SEQ ID NO: 1295 - DNA, 10 bp, Artificial Sequence
  Synthetic Polynucleotide
ggcgaagaag

SEQ ID NO: 1296 - DNA, 10 bp, Artificial Sequence
  Synthetic Polynucleotide
acgccagtaa

SEQ ID NO: 1297 - DNA, 10 bp, Artificial Sequence
  Synthetic Polynucleotide
gtggtcgtgg

SEQ ID NO: 1298 - DNA, 10 bp, Artificial Sequence
  Synthetic Polynucleotide
aaccgccacc

SEQ ID NO: 1299 - DNA, 10 bp, Artificial Sequence
  Synthetic Polynucleotide
agggtgacga

SEQ ID NO: 1300 - DNA, 10 bp, Artificial Sequence
  Synthetic Polynucleotide
aacgtagcgt

SEQ ID NO: 1301 - DNA, 10 bp, Artificial Sequence
  Synthetic Polynucleotide
tcgggattgt

SEQ ID NO: 1302 - DNA, 10 bp, Artificial Sequence
  Synthetic Polynucleotide
ccgaggaaca

SEQ ID NO: 1303 - DNA, 10 bp, Artificial Sequence
  Synthetic Polynucleotide
cgcgtcgggt

SEQ ID NO: 1304 - DNA, 10 bp, Artificial Sequence
  Synthetic Polynucleotide
gaagtcgccg

SEQ ID NO: 1305 - DNA, 10 bp, Artificial Sequence
  Synthetic Polynucleotide
cgcgatggtg

SEQ ID NO: 1306 - DNA, 10 bp, Artificial Sequence
  Synthetic Polynucleotide
tctgctgttc

SEQ ID NO: 1307 - DNA, 10 bp, Artificial Sequence
  Synthetic Polynucleotide
agtcctcacg

SEQ ID NO: 1308 - DNA, 10 bp, Artificial Sequence
  Synthetic Polynucleotide
tgaagccctg

SEQ ID NO: 1309 - DNA, 10 bp, Artificial Sequence
  Synthetic Polynucleotide
gcgagcgata

SEQ ID NO: 1310 - DNA, 10 bp, Artificial Sequence
  Synthetic Polynucleotide
acacggggag

SEQ ID NO: 1311 - DNA, 10 bp, Artificial Sequence
  Synthetic Polynucleotide
ccttggtgct

SEQ ID NO: 1312 - DNA, 10 bp, Artificial Sequence
  Synthetic Polynucleotide
gaaggtcacg

SEQ ID NO: 1313 - DNA, 10 bp, Artificial Sequence
  Synthetic Polynucleotide
gctccttgtc

SEQ ID NO: 1314 - DNA, 10 bp, Artificial Sequence
  Synthetic Polynucleotide
ccgtctttga

SEQ ID NO: 1315 - DNA, 10 bp, Artificial Sequence
  Synthetic Polynucleotide
aggtcggaaa

SEQ ID NO: 1316 - DNA, 10 bp, Artificial Sequence
  Synthetic Polynucleotide
aactgctccg

SEQ ID NO: 1317 - DNA, 10 bp, Artificial Sequence
  Synthetic Polynucleotide
ggacggaact

SEQ ID NO: 1318 - DNA, 10 bp, Artificial Sequence
  Synthetic Polynucleotide
gtccccgtcg

SEQ ID NO: 1319 - DNA, 10 bp, Artificial Sequence
  Synthetic Polynucleotide
ggagacggtg

SEQ ID NO: 1320 - DNA, 10 bp, Artificial Sequence
  Synthetic Polynucleotide
tgttggtggt

SEQ ID NO: 1321 - DNA, 10 bp, Artificial Sequence
  Synthetic Polynucleotide
acgacaaggt

SEQ ID NO: 1322 - DNA, 10 bp, Artificial Sequence
  Synthetic Polynucleotide
gagttgcaga

SEQ ID NO: 1323 - DNA, 10 bp, Artificial Sequence
  Synthetic Polynucleotide
tttccgcttg

SEQ ID NO: 1324 - DNA, 10 bp, Artificial Sequence
  Synthetic Polynucleotide
tcaacgcttc

SEQ ID NO: 1325 - DNA, 10 bp, Artificial Sequence
  Synthetic Polynucleotide
tcggctaaag

SEQ ID NO: 1326 - DNA, 10 bp, Artificial Sequence
  Synthetic Polynucleotide
agcccgatct

SEQ ID NO: 1327 - DNA, 10 bp, Artificial Sequence
  Synthetic Polynucleotide
gatgcagcgc

SEQ ID NO: 1328 - DNA, 10 bp, Artificial Sequence
  Synthetic Polynucleotide
ccaacgtcag

SEQ ID NO: 1329 - DNA, 10 bp, Artificial Sequence
  Synthetic Polynucleotide
gggtggttct

SEQ ID NO: 1330 - DNA, 10 bp, Artificial Sequence
  Synthetic Polynucleotide
aagcagagcc

SEQ ID NO: 1331 - DNA, 10 bp, Artificial Sequence
  Synthetic Polynucleotide
ctcgtcggat

SEQ ID NO: 1332 - DNA, 10 bp, Artificial Sequence
  Synthetic Polynucleotide
caacgcatcg

SEQ ID NO: 1333 - DNA, 10 bp, Artificial Sequence
  Synthetic Polynucleotide
atggtcaccg

SEQ ID NO: 1334 - DNA, 10 bp, Artificial Sequence
  Synthetic Polynucleotide
tgcagactgg

SEQ ID NO: 1335 - DNA, 10 bp, Artificial Sequence
  Synthetic Polynucleotide
tactgcgtta

SEQ ID NO: 1336 - DNA, 10 bp, Artificial Sequence
  Synthetic Polynucleotide
gcccctctca

SEQ ID NO: 1337 - DNA, 10 bp, Artificial Sequence
  Synthetic Polynucleotide
tcagcttcgg

SEQ ID NO: 1338 - DNA, 10 bp, Artificial Sequence
  Synthetic Polynucleotide
acctcgactt

SEQ ID NO: 1339 - DNA, 10 bp, Artificial Sequence
  Synthetic Polynucleotide
gctaccgcct

SEQ ID NO: 1340 - DNA, 10 bp, Artificial Sequence
  Synthetic Polynucleotide
ggggcagtgt

SEQ ID NO: 1341 - DNA, 10 bp, Artificial Sequence
  Synthetic Polynucleotide
taagctcggg

SEQ ID NO: 1342 - DNA, 10 bp, Artificial Sequence
  Synthetic Polynucleotide
atggtaggcc

SEQ ID NO: 1343 - DNA, 10 bp, Artificial Sequence
  Synthetic Polynucleotide
gacgacgaag

SEQ ID NO: 1344 - DNA, 10 bp, Artificial Sequence
  Synthetic Polynucleotide
ccaaaaccgg

SEQ ID NO: 1345 - DNA, 10 bp, Artificial Sequence
  Synthetic Polynucleotide
tcgggtggcc

SEQ ID NO: 1346 - DNA, 10 bp, Artificial Sequence
  Synthetic Polynucleotide
agcaaacgcc

SEQ ID NO: 1347 - DNA, 10 bp, Artificial Sequence
  Synthetic Polynucleotide
agctgcaaag

SEQ ID NO: 1348 - DNA, 10 bp, Artificial Sequence
  Synthetic Polynucleotide
ccattctgca

SEQ ID NO: 1349 - DNA, 10 bp, Artificial Sequence
  Synthetic Polynucleotide
actgaacgcc

SEQ ID NO: 1350 - DNA, 10 bp, Artificial Sequence
  Synthetic Polynucleotide
acaggttgcg

SEQ ID NO: 1351 - DNA, 10 bp, Artificial Sequence
  Synthetic Polynucleotide
tttgtgtgcc

SEQ ID NO: 1352 - DNA, 10 bp, Artificial Sequence
  Synthetic Polynucleotide
gaaccgccta

SEQ ID NO: 1353 - DNA, 10 bp, Artificial Sequence
  Synthetic Polynucleotide
ttcatcccgt

SEQ ID NO: 1354 - DNA, 10 bp, Artificial Sequence
  Synthetic Polynucleotide
accttgctga

SEQ ID NO: 1355 - DNA, 10 bp, Artificial Sequence
  Synthetic Polynucleotide
tcctcaagga

SEQ ID NO: 1356 - DNA, 10 bp, Artificial Sequence
  Synthetic Polynucleotide
attccgccga

SEQ ID NO: 1357 - DNA, 10 bp, Artificial Sequence
  Synthetic Polynucleotide
ccgctctaac

SEQ ID NO: 1358 - DNA, 10 bp, Artificial Sequence
  Synthetic Polynucleotide
catctgccgt

SEQ ID NO: 1359 - DNA, 10 bp, Artificial Sequence
  Synthetic Polynucleotide
gcgtgctatt

SEQ ID NO: 1360 - DNA, 10 bp, Artificial Sequence
  Synthetic Polynucleotide
tcacggttga

SEQ ID NO: 1361 - DNA, 10 bp, Artificial Sequence
  Synthetic Polynucleotide
ggtgttcagc

SEQ ID NO: 1362 - DNA, 10 bp, Artificial Sequence
  Synthetic Polynucleotide
tcactggcgt

SEQ ID NO: 1363 - DNA, 10 bp, Artificial Sequence
  Synthetic Polynucleotide
acgagctggc

SEQ ID NO: 1364 - DNA, 10 bp, Artificial Sequence
  Synthetic Polynucleotide
gatgatggcg

SEQ ID NO: 1365 - DNA, 10 bp, Artificial Sequence
  Synthetic Polynucleotide
caatgccgcc

SEQ ID NO: 1366 - DNA, 10 bp, Artificial Sequence
  Synthetic Polynucleotide
gcatgacggt

SEQ ID NO: 1367 - DNA, 10 bp, Artificial Sequence
  Synthetic Polynucleotide
gctgctgccg

SEQ ID NO: 1368 - DNA, 10 bp, Artificial Sequence
  Synthetic Polynucleotide
agctcttgct

SEQ ID NO: 1369 - DNA, 10 bp, Artificial Sequence
  Synthetic Polynucleotide
acgaagacga

SEQ ID NO: 1370 - DNA, 10 bp, Artificial Sequence
  Synthetic Polynucleotide
tccaccacca

SEQ ID NO: 1371 - DNA, 10 bp, Artificial Sequence
  Synthetic Polynucleotide
ggtggtggtg

SEQ ID NO: 1372 - DNA, 10 bp, Artificial Sequence
  Synthetic Polynucleotide
tggggttgca

SEQ ID NO: 1373 - DNA, 10 bp, Artificial Sequence
  Synthetic Polynucleotide
tgccgttctt

SEQ ID NO: 1374 - DNA, 10 bp, Artificial Sequence
  Synthetic Polynucleotide
cagcgttgat

SEQ ID NO: 1375 - DNA, 10 bp, Artificial Sequence
  Synthetic Polynucleotide
gcacctgcca

SEQ ID NO: 1376 - DNA, 10 bp, Artificial Sequence
  Synthetic Polynucleotide
gagtgccgcc

SEQ ID NO: 1377 - DNA, 10 bp, Artificial Sequence
  Synthetic Polynucleotide
catcgacgac

SEQ ID NO: 1378 - DNA, 10 bp, Artificial Sequence
  Synthetic Polynucleotide
tcgttgttga

SEQ ID NO: 1379 - DNA, 10 bp, Artificial Sequence
  Synthetic Polynucleotide
ccgatatgcc

SEQ ID NO: 1380 - DNA, 10 bp, Artificial Sequence
  Synthetic Polynucleotide
cagcagcagc

SEQ ID NO: 1381 - DNA, 10 bp, Artificial Sequence
  Synthetic Polynucleotide
aatgctgctg

SEQ ID NO: 1382 - DNA, 10 bp, Artificial Sequence
  Synthetic Polynucleotide
acatcggcac

SEQ ID NO: 1383 - DNA, 10 bp, Artificial Sequence
  Synthetic Polynucleotide
gttgacgacg

SEQ ID NO: 1384 - DNA, 10 bp, Artificial Sequence
  Synthetic Polynucleotide
atgggtcagc

SEQ ID NO: 1385 - DNA, 10 bp, Artificial Sequence
  Synthetic Polynucleotide
ggggatggtt

SEQ ID NO: 1386 - DNA, 10 bp, Artificial Sequence
  Synthetic Polynucleotide
gcattctgga

SEQ ID NO: 1387 - DNA, 10 bp, Artificial Sequence
  Synthetic Polynucleotide
cggtaaaggg

SEQ ID NO: 1388 - DNA, 10 bp, Artificial Sequence
  Synthetic Polynucleotide
gcgaatcagt

SEQ ID NO: 1389 - DNA, 10 bp, Artificial Sequence
  Synthetic Polynucleotide
agcaagagca

SEQ ID NO: 1390 - DNA, 10 bp, Artificial Sequence
  Synthetic Polynucleotide
tagcgttagg

SEQ ID NO: 1391 - DNA, 10 bp, Artificial Sequence
  Synthetic Polynucleotide
atggcaggag

SEQ ID NO: 1392 - DNA, 10 bp, Artificial Sequence
  Synthetic Polynucleotide
ttccgtctgg

SEQ ID NO: 1393 - DNA, 10 bp, Artificial Sequence
  Synthetic Polynucleotide
caacggaacc

SEQ ID NO: 1394 - DNA, 10 bp, Artificial Sequence
  Synthetic Polynucleotide
tgaaccgact

SEQ ID NO: 1395 - DNA, 10 bp, Artificial Sequence
  Synthetic Polynucleotide
atgagtggga

SEQ ID NO: 1396 - DNA, 10 bp, Artificial Sequence
  Synthetic Polynucleotide
tcttccgtca

SEQ ID NO: 1397 - DNA, 10 bp, Artificial Sequence
  Synthetic Polynucleotide
ggggcttagt

SEQ ID NO: 1398 - DNA, 10 bp, Artificial Sequence
  Synthetic Polynucleotide
gctcttccgt

SEQ ID NO: 1399 - DNA, 10 bp, Artificial Sequence
  Synthetic Polynucleotide
gcccttggat

SEQ ID NO: 1400 - DNA, 10 bp, Artificial Sequence
  Synthetic Polynucleotide
gtcggctgtc

SEQ ID NO: 1401 - DNA, 10 bp, Artificial Sequence
  Synthetic Polynucleotide
gcccacaagg

SEQ ID NO: 1402 - DNA, 10 bp, Artificial Sequence
  Synthetic Polynucleotide
tctgtcctca

SEQ ID NO: 1403 - DNA, 10 bp, Artificial Sequence
  Synthetic Polynucleotide
tcttcggaga

SEQ ID NO: 1404 - DNA, 10 bp, Artificial Sequence
  Synthetic Polynucleotide
ggccatacac

SEQ ID NO: 1405 - DNA, 10 bp, Artificial Sequence
  Synthetic Polynucleotide
tggcaacatg

SEQ ID NO: 1406 - DNA, 10 bp, Artificial Sequence
  Synthetic Polynucleotide
aactcgggac

SEQ ID NO: 1407 - DNA, 10 bp, Artificial Sequence
  Synthetic Polynucleotide
cacgctatga

SEQ ID NO: 1408 - DNA, 10 bp, Artificial Sequence
  Synthetic Polynucleotide
gcacatggaa

SEQ ID NO: 1409 - DNA, 10 bp, Artificial Sequence
  Synthetic Polynucleotide
tcgtggtccc

SEQ ID NO: 1410 - DNA, 10 bp, Artificial Sequence
  Synthetic Polynucleotide
agagtcacgt

SEQ ID NO: 1411 - DNA, 10 bp, Artificial Sequence
  Synthetic Polynucleotide
taaccccaac

SEQ ID NO: 1412 - DNA, 10 bp, Artificial Sequence
  Synthetic Polynucleotide
ggatcgcata

SEQ ID NO: 1413 - DNA, 10 bp, Artificial Sequence
  Synthetic Polynucleotide
tggcatcgac

SEQ ID NO: 1414 - DNA, 10 bp, Artificial Sequence
  Synthetic Polynucleotide
tccttggagg

SEQ ID NO: 1415 - DNA, 10 bp, Artificial Sequence
  Synthetic Polynucleotide
ccgtgctaag

SEQ ID NO: 1416 - DNA, 10 bp, Artificial Sequence
  Synthetic Polynucleotide
catcgggaca

SEQ ID NO: 1417 - DNA, 10 bp, Artificial Sequence
  Synthetic Polynucleotide
caagacgcta

SEQ ID NO: 1418 - DNA, 10 bp, Artificial Sequence
  Synthetic Polynucleotide
tgttttgggc

SEQ ID NO: 1419 - DNA, 10 bp, Artificial Sequence
  Synthetic Polynucleotide
cgcacaccgt

SEQ ID NO: 1420 - DNA, 10 bp, Artificial Sequence
  Synthetic Polynucleotide
atttgggccg

SEQ ID NO: 1421 - DNA, 10 bp, Artificial Sequence
  Synthetic Polynucleotide
cgaatctcgg

SEQ ID NO: 1422 - DNA, 10 bp, Artificial Sequence
  Synthetic Polynucleotide
catttgggcc

SEQ ID NO: 1423 - DNA, 10 bp, Artificial Sequence
  Synthetic Polynucleotide
cgtcatgtgc

SEQ ID NO: 1424 - DNA, 10 bp, Artificial Sequence
  Synthetic Polynucleotide
tatcgtcacc

SEQ ID NO: 1425 - DNA, 10 bp, Artificial Sequence
  Synthetic Polynucleotide
gctgcaactg

SEQ ID NO: 1426 - DNA, 10 bp, Artificial Sequence
  Synthetic Polynucleotide
acgacgctca

SEQ ID NO: 1427 - DNA, 10 bp, Artificial Sequence
  Synthetic Polynucleotide
tccagttcct

SEQ ID NO: 1428 - DNA, 10 bp, Artificial Sequence
  Synthetic Polynucleotide
actcaacgca

SEQ ID NO: 1429 - DNA, 10 bp, Artificial Sequence
  Synthetic Polynucleotide
gcgaccaaat

SEQ ID NO: 1430 - DNA, 10 bp, Artificial Sequence
  Synthetic Polynucleotide
tagcctttcc

SEQ ID NO: 1431 - DNA, 10 bp, Artificial Sequence
  Synthetic Polynucleotide
gccatccggt

SEQ ID NO: 1432 - DNA, 10 bp, Artificial Sequence
  Synthetic Polynucleotide
tcaggtcagg

SEQ ID NO: 1433 - DNA, 10 bp, Artificial Sequence
  Synthetic Polynucleotide
accaatggga

SEQ ID NO: 1434 - DNA, 10 bp, Artificial Sequence
  Synthetic Polynucleotide
tgaccacagt

SEQ ID NO: 1435 - DNA, 10 bp, Artificial Sequence
  Synthetic Polynucleotide
tctgcaactg

SEQ ID NO: 1436 - DNA, 10 bp, Artificial Sequence
  Synthetic Polynucleotide
cgctgcactc

SEQ ID NO: 1437 - DNA, 10 bp, Artificial Sequence
  Synthetic Polynucleotide
actccggcag

SEQ ID NO: 1438 - DNA, 10 bp, Artificial Sequence
  Synthetic Polynucleotide
cgctgctcct

SEQ ID NO: 1439 - DNA, 10 bp, Artificial Sequence
  Synthetic Polynucleotide
ttcctgcctg

SEQ ID NO: 1440 - DNA, 10 bp, Artificial Sequence
  Synthetic Polynucleotide
cgaaaaccgc

SEQ ID NO: 1441 - DNA, 10 bp, Artificial Sequence
  Synthetic Polynucleotide
gtgacgcaga

SEQ ID NO: 1442 - DNA, 10 bp, Artificial Sequence
  Synthetic Polynucleotide
gctttgacca

SEQ ID NO: 1443 - DNA, 10 bp, Artificial Sequence
  Synthetic Polynucleotide
tggaccgttg

SEQ ID NO: 1444 - DNA, 10 bp, Artificial Sequence
  Synthetic Polynucleotide
gcgctaaggg

SEQ ID NO: 1445 - DNA, 10 bp, Artificial Sequence
  Synthetic Polynucleotide
tgtgggagag

SEQ ID NO: 1446 - DNA, 10 bp, Artificial Sequence
  Synthetic Polynucleotide
cgcctgacaa

SEQ ID NO: 1447 - DNA, 10 bp, Artificial Sequence
  Synthetic Polynucleotide
accccaacgt

SEQ ID NO: 1448 - DNA, 10 bp, Artificial Sequence
  Synthetic Polynucleotide
ccgtcggagt

SEQ ID NO: 1449 - DNA, 10 bp, Artificial Sequence
  Synthetic Polynucleotide
gttcgctcgt

SEQ ID NO: 1450 - DNA, 10 bp, Artificial Sequence
  Synthetic Polynucleotide
gctgctccag

SEQ ID NO: 1451 - DNA, 10 bp, Artificial Sequence
  Synthetic Polynucleotide
attggcaacg

SEQ ID NO: 1452 - DNA, 10 bp, Artificial Sequence
  Synthetic Polynucleotide
tcaacgcttc

SEQ ID NO: 1453 - DNA, 10 bp, Artificial Sequence
  Synthetic Polynucleotide
tacctggccc

SEQ ID NO: 1454 - DNA, 10 bp, Artificial Sequence
  Synthetic Polynucleotide
tggagacgat

SEQ ID NO: 1455 - DNA, 10 bp, Artificial Sequence
  Synthetic Polynucleotide
aaggacgtgc

SEQ ID NO: 1456 - DNA, 10 bp, Artificial Sequence
  Synthetic Polynucleotide
cctgcaacag

SEQ ID NO: 1457 - DNA, 10 bp, Artificial Sequence
  Synthetic Polynucleotide
cgcgatggcc

SEQ ID NO: 1458 - DNA, 10 bp, Artificial Sequence
  Synthetic Polynucleotide
tgcttgttcc

SEQ ID NO: 1459 - DNA, 10 bp, Artificial Sequence
  Synthetic Polynucleotide
ggatgatggc

SEQ ID NO: 1460 - DNA, 10 bp, Artificial Sequence
  Synthetic Polynucleotide
cctgagcaca

SEQ ID NO: 1461 - DNA, 10 bp, Artificial Sequence
  Synthetic Polynucleotide
tagcatggtc

SEQ ID NO: 1462 - DNA, 10 bp, Artificial Sequence
  Synthetic Polynucleotide
tggcaaagga

SEQ ID NO: 1463 - DNA, 10 bp, Artificial Sequence
  Synthetic Polynucleotide
tggcaacagg

SEQ ID NO: 1464 - DNA, 10 bp, Artificial Sequence
  Synthetic Polynucleotide
gccaagacca

SEQ ID NO: 1465 - DNA, 10 bp, Artificial Sequence
  Synthetic Polynucleotide
tctgggttga

SEQ ID NO: 1466 - DNA, 10 bp, Artificial Sequence
  Synthetic Polynucleotide
ggagcacatc

SEQ ID NO: 1467 - DNA, 10 bp, Artificial Sequence
  Synthetic Polynucleotide
ggaggatggc

SEQ ID NO: 1468 - DNA, 10 bp, Artificial Sequence
  Synthetic Polynucleotide
cccagggaga

SEQ ID NO: 1469 - DNA, 10 bp, Artificial Sequence
  Synthetic Polynucleotide
ggagccattg

SEQ ID NO: 1470 - DNA, 10 bp, Artificial Sequence
  Synthetic Polynucleotide
gccatcatcc

SEQ ID NO: 1471 - DNA, 10 bp, Artificial Sequence
  Synthetic Polynucleotide
cgcgagatac

SEQ ID NO: 1472 - DNA, 10 bp, Artificial Sequence
  Synthetic Polynucleotide
gctgctcgaa

SEQ ID NO: 1473 - DNA, 10 bp, Artificial Sequence
  Synthetic Polynucleotide
acagtggagg

SEQ ID NO: 1474 - DNA, 10 bp, Artificial Sequence
  Synthetic Polynucleotide
gctgaaacga

SEQ ID NO: 1475 - DNA, 10 bp, Artificial Sequence
  Synthetic Polynucleotide
tccaggacat

SEQ ID NO: 1476 - DNA, 10 bp, Artificial Sequence
  Synthetic Polynucleotide
tgcttctcca

SEQ ID NO: 1477 - DNA, 10 bp, Artificial Sequence
  Synthetic Polynucleotide
tgtggaccaa

SEQ ID NO: 1478 - DNA, 10 bp, Artificial Sequence
  Synthetic Polynucleotide
cccaagccat

SEQ ID NO: 1479 - DNA, 10 bp, Artificial Sequence
  Synthetic Polynucleotide
gtgactggtg

SEQ ID NO: 1480 - DNA, 10 bp, Artificial Sequence
  Synthetic Polynucleotide
tgctgtgttc

SEQ ID NO: 1481 - DNA, 10 bp, Artificial Sequence
  Synthetic Polynucleotide
gcagaaggcc

SEQ ID NO: 1482 - DNA, 10 bp, Artificial Sequence
  Synthetic Polynucleotide
ctgctgtgtc

SEQ ID NO: 1483 - DNA, 10 bp, Artificial Sequence
  Synthetic Polynucleotide
gctgcctatg

SEQ ID NO: 1484 - DNA, 10 bp, Artificial Sequence
  Synthetic Polynucleotide
caccgcatgt

SEQ ID NO: 1485 - DNA, 10 bp, Artificial Sequence
  Synthetic Polynucleotide
gcttcggggc

SEQ ID NO: 1486 - DNA, 10 bp, Artificial Sequence
  Synthetic Polynucleotide
ggccctatca

SEQ ID NO: 1487 - DNA, 10 bp, Artificial Sequence
  Synthetic Polynucleotide
acgcccaata

SEQ ID NO: 1488 - DNA, 10 bp, Artificial Sequence
  Synthetic Polynucleotide
cctgaccagt

SEQ ID NO: 1489 - DNA, 10 bp, Artificial Sequence
  Synthetic Polynucleotide
tgacggatgg

SEQ ID NO: 1490 - DNA, 10 bp, Artificial Sequence
  Synthetic Polynucleotide
tgccagttgt

SEQ ID NO: 1491 - DNA, 10 bp, Artificial Sequence
  Synthetic Polynucleotide
gcacaagctg

SEQ ID NO: 1492 - DNA, 10 bp, Artificial Sequence
  Synthetic Polynucleotide
cttctgccag

SEQ ID NO: 1493 - DNA, 10 bp, Artificial Sequence
  Synthetic Polynucleotide
tcttcagtgc

SEQ ID NO: 1494 - DNA, 10 bp, Artificial Sequence
  Synthetic Polynucleotide
gttgagctgc

SEQ ID NO: 1495 - DNA, 10 bp, Artificial Sequence
  Synthetic Polynucleotide
tcagctccct

SEQ ID NO: 1496 - DNA, 10 bp, Artificial Sequence
  Synthetic Polynucleotide
gctttgacca

SEQ ID NO: 1497 - DNA, 10 bp, Artificial Sequence
  Synthetic Polynucleotide
acggcatcaa

SEQ ID NO: 1498 - DNA, 10 bp, Artificial Sequence
  Synthetic Polynucleotide
acaagggtgt

SEQ ID NO: 1499 - DNA, 10 bp, Artificial Sequence
  Synthetic Polynucleotide
tgaacaggga

SEQ ID NO: 1500 - DNA, 10 bp, Artificial Sequence
  Synthetic Polynucleotide
gacgttgcct

SEQ ID NO: 1501 - DNA, 10 bp, Artificial Sequence
  Synthetic Polynucleotide
tggaagcact

SEQ ID NO: 1502 - DNA, 10 bp, Artificial Sequence
  Synthetic Polynucleotide
tacgagccat

SEQ ID NO: 1503 - DNA, 10 bp, Artificial Sequence
  Synthetic Polynucleotide
gctaccatgc

SEQ ID NO: 1504 - DNA, 10 bp, Artificial Sequence
  Synthetic Polynucleotide
tggtgtcact

SEQ ID NO: 1505 - DNA, 10 bp, Artificial Sequence
  Synthetic Polynucleotide
gggtgaacca

SEQ ID NO: 1506 - DNA, 10 bp, Artificial Sequence
  Synthetic Polynucleotide
tccatcgtgc

SEQ ID NO: 1507 - DNA, 10 bp, Artificial Sequence
  Synthetic Polynucleotide
gccaaagagg

SEQ ID NO: 1508 - DNA, 10 bp, Artificial Sequence
  Synthetic Polynucleotide
aaggctttgc

SEQ ID NO: 1509 - DNA, 10 bp, Artificial Sequence
  Synthetic Polynucleotide
gatggagggc

SEQ ID NO: 1510 - DNA, 10 bp, Artificial Sequence
  Synthetic Polynucleotide
cccctggtct

SEQ ID NO: 1511 - DNA, 10 bp, Artificial Sequence
  Synthetic Polynucleotide
cagcaatgga

SEQ ID NO: 1512 - DNA, 10 bp, Artificial Sequence
  Synthetic Polynucleotide
tagattgggc

SEQ ID NO: 1513 - DNA, 10 bp, Artificial Sequence
  Synthetic Polynucleotide
caacagcaca

SEQ ID NO: 1514 - DNA, 10 bp, Artificial Sequence
  Synthetic Polynucleotide
gcttcagcga

SEQ ID NO: 1515 - DNA, 10 bp, Artificial Sequence
  Synthetic Polynucleotide
tggatcggga

SEQ ID NO: 1516 - DNA, 10 bp, Artificial Sequence
  Synthetic Polynucleotide
aagggtcggc

SEQ ID NO: 1517 - DNA, 10 bp, Artificial Sequence
  Synthetic Polynucleotide
tcggttccca

SEQ ID NO: 1518 - DNA, 10 bp, Artificial Sequence
  Synthetic Polynucleotide
agttccccta

SEQ ID NO: 1519 - DNA, 10 bp, Artificial Sequence
  Synthetic Polynucleotide
ccgtggtaga

SEQ ID NO: 1520 - DNA, 10 bp, Artificial Sequence
  Synthetic Polynucleotide
caggatgccg

SEQ ID NO: 1521 - DNA, 10 bp, Artificial Sequence
  Synthetic Polynucleotide
cgacgatgac

SEQ ID NO: 1522 - DNA, 10 bp, Artificial Sequence
  Synthetic Polynucleotide
ccgtgtttga

SEQ ID NO: 1523 - DNA, 10 bp, Artificial Sequence
  Synthetic Polynucleotide
tgttgttgcc

SEQ ID NO: 1524 - DNA, 10 bp, Artificial Sequence
  Synthetic Polynucleotide
tccccattga

SEQ ID NO: 1525 - DNA, 10 bp, Artificial Sequence
  Synthetic Polynucleotide
tgggatgcat

SEQ ID NO: 1526 - DNA, 10 bp, Artificial Sequence
  Synthetic Polynucleotide
gcataggcac

SEQ ID NO: 1527 - DNA, 10 bp, Artificial Sequence
  Synthetic Polynucleotide
tacaggcagc

SEQ ID NO: 1528 - DNA, 10 bp, Artificial Sequence
  Synthetic Polynucleotide
ccatccatgc

SEQ ID NO: 1529 - DNA, 10 bp, Artificial Sequence
  Synthetic Polynucleotide
acaaaaggcc

SEQ ID NO: 1530 - DNA, 10 bp, Artificial Sequence
  Synthetic Polynucleotide
ctgctcgata

SEQ ID NO: 1531 - DNA, 10 bp, Artificial Sequence
  Synthetic Polynucleotide
tatgcagcag

SEQ ID NO: 1532 - DNA, 10 bp, Artificial Sequence
  Synthetic Polynucleotide
ccaatgctca

SEQ ID NO: 1533 - DNA, 10 bp, Artificial Sequence
  Synthetic Polynucleotide
gatgggcatg

SEQ ID NO: 1534 - DNA, 10 bp, Artificial Sequence
  Synthetic Polynucleotide
ccatcaggcc

SEQ ID NO: 1535 - DNA, 10 bp, Artificial Sequence
  Synthetic Polynucleotide
gtgctcagca

SEQ ID NO: 1536 - DNA, 10 bp, Artificial Sequence
  Synthetic Polynucleotide
cctctccaga

SEQ ID NO: 1537 - DNA, 10 bp, Artificial Sequence
  Synthetic Polynucleotide
gcaccaaacg

SEQ ID NO: 1538 - DNA, 10 bp, Artificial Sequence
  Synthetic Polynucleotide
tgattgccag

SEQ ID NO: 1539 - DNA, 10 bp, Artificial Sequence
  Synthetic Polynucleotide
tcaaaaggca

SEQ ID NO: 1540 - DNA, 10 bp, Artificial Sequence
  Synthetic Polynucleotide
actccacaca

SEQ ID NO: 1541 - DNA, 10 bp, Artificial Sequence
  Synthetic Polynucleotide
accccaatga

SEQ ID NO: 1542 - DNA, 10 bp, Artificial Sequence
  Synthetic Polynucleotide
ccatcatggc

SEQ ID NO: 1543 - DNA, 10 bp, Artificial Sequence
  Synthetic Polynucleotide
agcaaaagca

SEQ ID NO: 1544 - DNA, 10 bp, Artificial Sequence
  Synthetic Polynucleotide
gcccacaaaa

SEQ ID NO: 1545 - DNA, 10 bp, Artificial Sequence
  Synthetic Polynucleotide
gctggcaagg

SEQ ID NO: 1546 - DNA, 10 bp, Artificial Sequence
  Synthetic Polynucleotide
cgagagcata

SEQ ID NO: 1547 - DNA, 10 bp, Artificial Sequence
  Synthetic Polynucleotide
gcggattcgt

SEQ ID NO: 1548 - DNA, 10 bp, Artificial Sequence
  Synthetic Polynucleotide
gcttgagtgc

SEQ ID NO: 1549 - DNA, 10 bp, Artificial Sequence
  Synthetic Polynucleotide
tcagatgcac

SEQ ID NO: 1550 - DNA, 10 bp, Artificial Sequence
  Synthetic Polynucleotide
ttgtccctgc

SEQ ID NO: 1551 - DNA, 10 bp, Artificial Sequence
  Synthetic Polynucleotide
gccatgacgg

SEQ ID NO: 1552 - DNA, 10 bp, Artificial Sequence
  Synthetic Polynucleotide
atgtcctggc

SEQ ID NO: 1553 - DNA, 10 bp, Artificial Sequence
  Synthetic Polynucleotide
tgtgtgatgc

SEQ ID NO: 1554 - DNA, 10 bp, Artificial Sequence
  Synthetic Polynucleotide
gagcaaagga

SEQ ID NO: 1555 - DNA, 10 bp, Artificial Sequence
  Synthetic Polynucleotide
tagcccttct

SEQ ID NO: 1556 - DNA, 10 bp, Artificial Sequence
  Synthetic Polynucleotide
gccccgaagc

SEQ ID NO: 1557 - DNA, 10 bp, Artificial Sequence
  Synthetic Polynucleotide
atggatggga

SEQ ID NO: 1558 - DNA, 10 bp, Artificial Sequence
  Synthetic Polynucleotide
tcgccaaaat

SEQ ID NO: 1559 - DNA, 10 bp, Artificial Sequence
  Synthetic Polynucleotide
tggcaacagg

SEQ ID NO: 1560 - DNA, 10 bp, Artificial Sequence
  Synthetic Polynucleotide
tgccctcaat

SEQ ID NO: 1561 - DNA, 10 bp, Artificial Sequence
  Synthetic Polynucleotide
gccgaccaaa

SEQ ID NO: 1562 - DNA, 10 bp, Artificial Sequence
  Synthetic Polynucleotide
gcaatgcagc

SEQ ID NO: 1563 - DNA, 10 bp, Artificial Sequence
  Synthetic Polynucleotide
tgtttggtgc

SEQ ID NO: 1564 - DNA, 10 bp, Artificial Sequence
  Synthetic Polynucleotide
ttgccagtgc

SEQ ID NO: 1565 - DNA, 10 bp, Artificial Sequence
  Synthetic Polynucleotide
tggcaaggaa

SEQ ID NO: 1566 - DNA, 10 bp, Artificial Sequence
  Synthetic Polynucleotide
cctggagtgc

SEQ ID NO: 1567 - DNA, 10 bp, Artificial Sequence
  Synthetic Polynucleotide
tgcatgagct

SEQ ID NO: 1568 - DNA, 10 bp, Artificial Sequence
  Synthetic Polynucleotide
gcaagatccc

SEQ ID NO: 1569 - DNA, 10 bp, Artificial Sequence
  Synthetic Polynucleotide
atggtgcagg

SEQ ID NO: 1570 - DNA, 10 bp, Artificial Sequence
  Synthetic Polynucleotide
agcatgagca

SEQ ID NO: 1571 - DNA, 10 bp, Artificial Sequence
  Synthetic Polynucleotide
tcagccaagg

SEQ ID NO: 1572 - DNA, 10 bp, Artificial Sequence
  Synthetic Polynucleotide
tgccatcatg

SEQ ID NO: 1573 - DNA, 10 bp, Artificial Sequence
  Synthetic Polynucleotide
ggaatgcaga

SEQ ID NO: 1574 - DNA, 10 bp, Artificial Sequence
  Synthetic Polynucleotide
tgattgggcc

SEQ ID NO: 1575 - DNA, 10 bp, Artificial Sequence
  Synthetic Polynucleotide
tgcagacaca

SEQ ID NO: 1576 - DNA, 10 bp, Artificial Sequence
  Synthetic Polynucleotide
gcagcaaacc

SEQ ID NO: 1577 - DNA, 10 bp, Artificial Sequence
  Synthetic Polynucleotide
tagaaggggt

SEQ ID NO: 1578 - DNA, 10 bp, Artificial Sequence
  Synthetic Polynucleotide
cctgggtagc

SEQ ID NO: 1579 - DNA, 10 bp, Artificial Sequence
  Synthetic Polynucleotide
agcaaaagca

SEQ ID NO: 1580 - DNA, 10 bp, Artificial Sequence
  Synthetic Polynucleotide
gccatccaca

SEQ ID NO: 1581 - DNA, 10 bp, Artificial Sequence
  Synthetic Polynucleotide
ttctggaggg

SEQ ID NO: 1582 - DNA, 10 bp, Artificial Sequence
  Synthetic Polynucleotide
tctggggtga

SEQ ID NO: 1583 - DNA, 10 bp, Artificial Sequence
  Synthetic Polynucleotide
tcatggtcct

SEQ ID NO: 1584 - DNA, 10 bp, Artificial Sequence
  Synthetic Polynucleotide
gtgcatctga

SEQ ID NO: 1585 - DNA, 10 bp, Artificial Sequence
  Synthetic Polynucleotide
tgggaccttt

SEQ ID NO: 1586 - DNA, 10 bp, Artificial Sequence
  Synthetic Polynucleotide
gctccaaaga

SEQ ID NO: 1587 - DNA, 10 bp, Artificial Sequence
  Synthetic Polynucleotide
aatgccccaa

SEQ ID NO: 1588 - DNA, 10 bp, Artificial Sequence
  Synthetic Polynucleotide
catcgtggca

SEQ ID NO: 1589 - DNA, 10 bp, Artificial Sequence
  Synthetic Polynucleotide
agcaaaagca

SEQ ID NO: 1590 - DNA, 10 bp, Artificial Sequence
  Synthetic Polynucleotide
ccatggtgta

SEQ ID NO: 1591 - DNA, 10 bp, Artificial Sequence
  Synthetic Polynucleotide
aagtgccagc

SEQ ID NO: 1592 - DNA, 10 bp, Artificial Sequence
  Synthetic Polynucleotide
tagggttcct

SEQ ID NO: 1593 - DNA, 10 bp, Artificial Sequence
  Synthetic Polynucleotide
tggcaaatgg

SEQ ID NO: 1594 - DNA, 10 bp, Artificial Sequence
  Synthetic Polynucleotide
gactgctcga

SEQ ID NO: 1595 - DNA, 10 bp, Artificial Sequence
  Synthetic Polynucleotide
ggaggatgga

SEQ ID NO: 1596 - DNA, 10 bp, Artificial Sequence
  Synthetic Polynucleotide
gtggaatggc

SEQ ID NO: 1597 - DNA, 10 bp, Artificial Sequence
  Synthetic Polynucleotide
ggcaaagtgg

SEQ ID NO: 1598 - DNA, 10 bp, Artificial Sequence
  Synthetic Polynucleotide
tgcattgtcc

SEQ ID NO: 1599 - DNA, 10 bp, Artificial Sequence
  Synthetic Polynucleotide
gcagtgacac

SEQ ID NO: 1600 - DNA, 10 bp, Artificial Sequence
  Synthetic Polynucleotide
aacctgtggt

SEQ ID NO: 1601 - DNA, 10 bp, Artificial Sequence
  Synthetic Polynucleotide
gcaacagggt

SEQ ID NO: 1602 - DNA, 10 bp, Artificial Sequence
  Synthetic Polynucleotide
tcctgaccaa

SEQ ID NO: 1603 - DNA, 10 bp, Artificial Sequence
  Synthetic Polynucleotide
tgccaacaga

SEQ ID NO: 1604 - DNA, 10 bp, Artificial Sequence
  Synthetic Polynucleotide
ccatcaggcc

SEQ ID NO: 1605 - DNA, 10 bp, Artificial Sequence
  Synthetic Polynucleotide
tgcagagaca

SEQ ID NO: 1606 - DNA, 10 bp, Artificial Sequence
  Synthetic Polynucleotide
accagcaatg

SEQ ID NO: 1607 - DNA, 10 bp, Artificial Sequence
  Synthetic Polynucleotide
tggggcattc

SEQ ID NO: 1608 - DNA, 10 bp, Artificial Sequence
  Synthetic Polynucleotide
tgctccactt

SEQ ID NO: 1609 - DNA, 10 bp, Artificial Sequence
  Synthetic Polynucleotide
tcctcatcgg

SEQ ID NO: 1610 - DNA, 10 bp, Artificial Sequence
  Synthetic Polynucleotide
gatccagcca

SEQ ID NO: 1611 - DNA, 10 bp, Artificial Sequence
  Synthetic Polynucleotide
cacgctcacc

SEQ ID NO: 1612 - DNA, 10 bp, Artificial Sequence
  Synthetic Polynucleotide
tgacaagccc

SEQ ID NO: 1613 - DNA, 10 bp, Artificial Sequence
  Synthetic Polynucleotide
aggaacagga

SEQ ID NO: 1614 - DNA, 10 bp, Artificial Sequence
  Synthetic Polynucleotide
caggcactcc

SEQ ID NO: 1615 - DNA, 10 bp, Artificial Sequence
  Synthetic Polynucleotide
gcatctccac

SEQ ID NO: 1616 - DNA, 10 bp, Artificial Sequence
  Synthetic Polynucleotide
cagccactgc

SEQ ID NO: 1617 - DNA, 10 bp, Artificial Sequence
  Synthetic Polynucleotide
cttggtcagc

SEQ ID NO: 1618 - DNA, 10 bp, Artificial Sequence
  Synthetic Polynucleotide
attcctcgct

SEQ ID NO: 1619 - DNA, 10 bp, Artificial Sequence
  Synthetic Polynucleotide
gatgcaagga

SEQ ID NO: 1620 - DNA, 10 bp, Artificial Sequence
  Synthetic Polynucleotide
tcaaagctgc

SEQ ID NO: 1621 - DNA, 10 bp, Artificial Sequence
  Synthetic Polynucleotide
agcaaaagca

SEQ ID NO: 1622 - DNA, 10 bp, Artificial Sequence
  Synthetic Polynucleotide
catcctcccc

SEQ ID NO: 1623 - DNA, 10 bp, Artificial Sequence
  Synthetic Polynucleotide
gggtcatgtg

SEQ ID NO: 1624 - DNA, 10 bp, Artificial Sequence
  Synthetic Polynucleotide
ggccatctgt

SEQ ID NO: 1625 - DNA, 10 bp, Artificial Sequence
  Synthetic Polynucleotide
gtcacaaggg

SEQ ID NO: 1626 - DNA, 10 bp, Artificial Sequence
  Synthetic Polynucleotide
ctgcttgcaa

SEQ ID NO: 1627 - DNA, 10 bp, Artificial Sequence
  Synthetic Polynucleotide
tgtttggagc

SEQ ID NO: 1628 - DNA, 10 bp, Artificial Sequence
  Synthetic Polynucleotide
caatcggcaa

SEQ ID NO: 1629 - DNA, 10 bp, Artificial Sequence
  Synthetic Polynucleotide
gtcgaacctc

SEQ ID NO: 1630 - DNA, 10 bp, Artificial Sequence
  Synthetic Polynucleotide
tggtggaaca

SEQ ID NO: 1631 - DNA, 10 bp, Artificial Sequence
  Synthetic Polynucleotide
ccatggtgtc

SEQ ID NO: 1632 - DNA, 10 bp, Artificial Sequence
  Synthetic Polynucleotide
gtcctgttgc

SEQ ID NO: 1633 - DNA, 10 bp, Artificial Sequence
  Synthetic Polynucleotide
cacgatcagc

SEQ ID NO: 1634 - DNA, 10 bp, Artificial Sequence
  Synthetic Polynucleotide
ccgtttccgt

SEQ ID NO: 1635 - DNA, 10 bp, Artificial Sequence
  Synthetic Polynucleotide
tgatgtggga

SEQ ID NO: 1636 - DNA, 10 bp, Artificial Sequence
  Synthetic Polynucleotide
cacaaggtcc

SEQ ID NO: 1637 - DNA, 10 bp, Artificial Sequence
  Synthetic Polynucleotide
gaatgctgga

SEQ ID NO: 1638 - DNA, 10 bp, Artificial Sequence
  Synthetic Polynucleotide
tcccattgga

SEQ ID NO: 1639 - DNA, 10 bp, Artificial Sequence
  Synthetic Polynucleotide
ctgtgtgcaa

SEQ ID NO: 1640 - DNA, 10 bp, Artificial Sequence
  Synthetic Polynucleotide
ggtgactgtg

SEQ ID NO: 1641 - DNA, 10 bp, Artificial Sequence
  Synthetic Polynucleotide
tgtaccgagt

SEQ ID NO: 1642 - DNA, 10 bp, Artificial Sequence
  Synthetic Polynucleotide
tcgaactgtg

SEQ ID NO: 1643 - DNA, 10 bp, Artificial Sequence
  Synthetic Polynucleotide
gatgccccat

SEQ ID NO: 1644 - DNA, 10 bp, Artificial Sequence
  Synthetic Polynucleotide
tccaccaact

SEQ ID NO: 1645 - DNA, 10 bp, Artificial Sequence
  Synthetic Polynucleotide
accaagtgga

SEQ ID NO: 1646 - DNA, 10 bp, Artificial Sequence
  Synthetic Polynucleotide
atcacgaccc

SEQ ID NO: 1647 - DNA, 10 bp, Artificial Sequence
  Synthetic Polynucleotide
ggcaatagca

SEQ ID NO: 1648 - DNA, 10 bp, Artificial Sequence
  Synthetic Polynucleotide
agtgccacaa

SEQ ID NO: 1649 - DNA, 10 bp, Artificial Sequence
  Synthetic Polynucleotide
caggaagtgc

SEQ ID NO: 1650 - DNA, 10 bp, Artificial Sequence
  Synthetic Polynucleotide
tcgccaaaat

SEQ ID NO: 1651 - DNA, 10 bp, Artificial Sequence
  Synthetic Polynucleotide
catggagagc

SEQ ID NO: 1652 - DNA, 10 bp, Artificial Sequence
  Synthetic Polynucleotide
tctgtgctgg

SEQ ID NO: 1653 - DNA, 10 bp, Artificial Sequence
  Synthetic Polynucleotide
agcacagctt

SEQ ID NO: 1654 - DNA, 10 bp, Artificial Sequence
  Synthetic Polynucleotide
actccccaga

SEQ ID NO: 1655 - DNA, 10 bp, Artificial Sequence
  Synthetic Polynucleotide
agcaggggaa

SEQ ID NO: 1656 - DNA, 10 bp, Artificial Sequence
  Synthetic Polynucleotide
gcaacactgc

SEQ ID NO: 1657 - DNA, 10 bp, Artificial Sequence
  Synthetic Polynucleotide
gggctctttg

SEQ ID NO: 1658 - DNA, 10 bp, Artificial Sequence
  Synthetic Polynucleotide
cccgaagcta

SEQ ID NO: 1659 - DNA, 10 bp, Artificial Sequence
  Synthetic Polynucleotide
acggatggga

SEQ ID NO: 1660 - DNA, 10 bp, Artificial Sequence
  Synthetic Polynucleotide
tcaaggcagt

SEQ ID NO: 1661 - DNA, 10 bp, Artificial Sequence
  Synthetic Polynucleotide
tgctcatcgg

SEQ ID NO: 1662 - DNA, 10 bp, Artificial Sequence
  Synthetic Polynucleotide
agccagacca

SEQ ID NO: 1663 - DNA, 10 bp, Artificial Sequence
  Synthetic Polynucleotide
tatccaggca

SEQ ID NO: 1664 - DNA, 10 bp, Artificial Sequence
  Synthetic Polynucleotide
tctccttccc

SEQ ID NO: 1665 - DNA, 10 bp, Artificial Sequence
  Synthetic Polynucleotide
actgctttgc

SEQ ID NO: 1666 - DNA, 10 bp, Artificial Sequence
  Synthetic Polynucleotide
tctcctccca

SEQ ID NO: 1667 - DNA, 10 bp, Artificial Sequence
  Synthetic Polynucleotide
gccaggcgat

SEQ ID NO: 1668 - DNA, 10 bp, Artificial Sequence
  Synthetic Polynucleotide
tccctgcata

SEQ ID NO: 1669 - DNA, 10 bp, Artificial Sequence
  Synthetic Polynucleotide
gcagttgctt

SEQ ID NO: 1670 - DNA, 10 bp, Artificial Sequence
  Synthetic Polynucleotide
ctctttccgg

SEQ ID NO: 1671 - DNA, 10 bp, Artificial Sequence
  Synthetic Polynucleotide
acagacaggc

SEQ ID NO: 1672 - DNA, 10 bp, Artificial Sequence
  Synthetic Polynucleotide
acttgacgca

SEQ ID NO: 1673 - DNA, 10 bp, Artificial Sequence
  Synthetic Polynucleotide
aaagtggtgc

SEQ ID NO: 1674 - DNA, 10 bp, Artificial Sequence
  Synthetic Polynucleotide
ccattctgca

SEQ ID NO: 1675 - DNA, 10 bp, Artificial Sequence
  Synthetic Polynucleotide
ccaatgggac

SEQ ID NO: 1676 - DNA, 10 bp, Artificial Sequence
  Synthetic Polynucleotide
ccactgcaaa

SEQ ID NO: 1677 - DNA, 10 bp, Artificial Sequence
  Synthetic Polynucleotide
gagcctttga

SEQ ID NO: 1678 - DNA, 10 bp, Artificial Sequence
  Synthetic Polynucleotide
ccaaccgaag

SEQ ID NO: 1679 - DNA, 10 bp, Artificial Sequence
  Synthetic Polynucleotide
aggagctgga

SEQ ID NO: 1680 - DNA, 10 bp, Artificial Sequence
  Synthetic Polynucleotide
ggcatgtggc

SEQ ID NO: 1681 - DNA, 10 bp, Artificial Sequence
  Synthetic Polynucleotide
gctggtcata

SEQ ID NO: 1682 - DNA, 10 bp, Artificial Sequence
  Synthetic Polynucleotide
atctgccgag

SEQ ID NO: 1683 - DNA, 10 bp, Artificial Sequence
  Synthetic Polynucleotide
actgatgcgg

SEQ ID NO: 1684 - DNA, 10 bp, Artificial Sequence
  Synthetic Polynucleotide
tgctcgttta

SEQ ID NO: 1685 - DNA, 10 bp, Artificial Sequence
  Synthetic Polynucleotide
gccagaatgg

SEQ ID NO: 1686 - DNA, 10 bp, Artificial Sequence
  Synthetic Polynucleotide
tctgagctgt

SEQ ID NO: 1687 - DNA, 10 bp, Artificial Sequence
  Synthetic Polynucleotide
accgaaaacg

SEQ ID NO: 1688 - DNA, 10 bp, Artificial Sequence
  Synthetic Polynucleotide
cccagtgttc

SEQ ID NO: 1689 - DNA, 10 bp, Artificial Sequence
  Synthetic Polynucleotide
tgcagatggc

SEQ ID NO: 1690 - DNA, 10 bp, Artificial Sequence
  Synthetic Polynucleotide
ggtacctcca

SEQ ID NO: 1691 - DNA, 10 bp, Artificial Sequence
  Synthetic Polynucleotide
gaggaggagc

SEQ ID NO: 1692 - DNA, 10 bp, Artificial Sequence
  Synthetic Polynucleotide
tagggtctgg

SEQ ID NO: 1693 - DNA, 10 bp, Artificial Sequence
  Synthetic Polynucleotide
ctgcagccaa

SEQ ID NO: 1694 - DNA, 10 bp, Artificial Sequence
  Synthetic Polynucleotide
ggtgcaatgg

SEQ ID NO: 1695 - DNA, 10 bp, Artificial Sequence
  Synthetic Polynucleotide
tatgcccact

SEQ ID NO: 1696 - DNA, 10 bp, Artificial Sequence
  Synthetic Polynucleotide
ccagagtgga

SEQ ID NO: 1697 - DNA, 10 bp, Artificial Sequence
  Synthetic Polynucleotide
tccggtccac

SEQ ID NO: 1698 - DNA, 10 bp, Artificial Sequence
  Synthetic Polynucleotide
ccccatcctc

SEQ ID NO: 1699 - DNA, 10 bp, Artificial Sequence
  Synthetic Polynucleotide
caacagcgtc

SEQ ID NO: 1700 - DNA, 10 bp, Artificial Sequence
  Synthetic Polynucleotide
gccaatcctc

SEQ ID NO: 1701 - DNA, 10 bp, Artificial Sequence
  Synthetic Polynucleotide
caccaagtgg

SEQ ID NO: 1702 - DNA, 10 bp, Artificial Sequence
  Synthetic Polynucleotide
ggcgggattt

SEQ ID NO: 1703 - DNA, 10 bp, Artificial Sequence
  Synthetic Polynucleotide
cccctgatgt

SEQ ID NO: 1704 - DNA, 10 bp, Artificial Sequence
  Synthetic Polynucleotide
ccactgggag

SEQ ID NO: 1705 - DNA, 10 bp, Artificial Sequence
  Synthetic Polynucleotide
aggatggtga

SEQ ID NO: 1706 - DNA, 10 bp, Artificial Sequence
  Synthetic Polynucleotide
actgcccaca

SEQ ID NO: 1707 - DNA, 10 bp, Artificial Sequence
  Synthetic Polynucleotide
tgcagatggc

SEQ ID NO: 1708 - DNA, 10 bp, Artificial Sequence
  Synthetic Polynucleotide
ggcgagcata

SEQ ID NO: 1709 - DNA, 10 bp, Artificial Sequence
  Synthetic Polynucleotide
ggctttggtg

SEQ ID NO: 1710 - DNA, 10 bp, Artificial Sequence
  Synthetic Polynucleotide
ggggtgcttg

SEQ ID NO: 1711 - DNA, 10 bp, Artificial Sequence
  Synthetic Polynucleotide
tggaacccat

SEQ ID NO: 1712 - DNA, 10 bp, Artificial Sequence
  Synthetic Polynucleotide
aacaggcgac

SEQ ID NO: 1713 - DNA, 10 bp, Artificial Sequence
  Synthetic Polynucleotide
gaggacgagg

SEQ ID NO: 1714 - DNA, 10 bp, Artificial Sequence
  Synthetic Polynucleotide
ccacttggtg

SEQ ID NO: 1715 - DNA, 10 bp, Artificial Sequence
  Synthetic Polynucleotide
ggctttgggg

SEQ ID NO: 1716 - DNA, 10 bp, Artificial Sequence
  Synthetic Polynucleotide
tgccaatcct

SEQ ID NO: 1717 - DNA, 10 bp, Artificial Sequence
  Synthetic Polynucleotide
gcacaaggtc

SEQ ID NO: 1718 - DNA, 10 bp, Artificial Sequence
  Synthetic Polynucleotide
agttgcagca

SEQ ID NO: 1719 - DNA, 10 bp, Artificial Sequence
  Synthetic Polynucleotide
aggaggagga

SEQ ID NO: 1720 - DNA, 10 bp, Artificial Sequence
  Synthetic Polynucleotide
gggtttgctc

SEQ ID NO: 1721 - DNA, 10 bp, Artificial Sequence
  Synthetic Polynucleotide
aaaatcccgc

SEQ ID NO: 1722 - DNA, 10 bp, Artificial Sequence
  Synthetic Polynucleotide
tgcttagggt

SEQ ID NO: 1723 - DNA, 10 bp, Artificial Sequence
  Synthetic Polynucleotide
gcccttaggt

SEQ ID NO: 1724 - DNA, 10 bp, Artificial Sequence
  Synthetic Polynucleotide
cagcccatac

SEQ ID NO: 1725 - DNA, 10 bp, Artificial Sequence
  Synthetic Polynucleotide
gaccgcctgt

SEQ ID NO: 1726 - DNA, 10 bp, Artificial Sequence
  Synthetic Polynucleotide
gtgctggtcc

SEQ ID NO: 1727 - DNA, 10 bp, Artificial Sequence
  Synthetic Polynucleotide
caggtagggg

SEQ ID NO: 1728 - DNA, 10 bp, Artificial Sequence
  Synthetic Polynucleotide
agaacagcca

SEQ ID NO: 1729 - DNA, 10 bp, Artificial Sequence
  Synthetic Polynucleotide
gaggatgcca

SEQ ID NO: 1730 - DNA, 10 bp, Artificial Sequence
  Synthetic Polynucleotide
cattctccgc

SEQ ID NO: 1731 - DNA, 10 bp, Artificial Sequence
  Synthetic Polynucleotide
aaagggcaca

SEQ ID NO: 1732 - DNA, 10 bp, Artificial Sequence
  Synthetic Polynucleotide
cagcaggttg

SEQ ID NO: 1733 - DNA, 10 bp, Artificial Sequence
  Synthetic Polynucleotide
acaagccaga

SEQ ID NO: 1734 - DNA, 10 bp, Artificial Sequence
  Synthetic Polynucleotide
tgtatgctgc

SEQ ID NO: 1735 - DNA, 10 bp, Artificial Sequence
  Synthetic Polynucleotide
actcatgggg

SEQ ID NO: 1736 - DNA, 10 bp, Artificial Sequence
  Synthetic Polynucleotide
ctctcgtcct

SEQ ID NO: 1737 - DNA, 10 bp, Artificial Sequence
  Synthetic Polynucleotide
agagacggca

SEQ ID NO: 1738 - DNA, 10 bp, Artificial Sequence
  Synthetic Polynucleotide
atcaggagca

SEQ ID NO: 1739 - DNA, 10 bp, Artificial Sequence
  Synthetic Polynucleotide
tccagaggag

SEQ ID NO: 1740 - DNA, 10 bp, Artificial Sequence
  Synthetic Polynucleotide
gggtctctca

SEQ ID NO: 1741 - DNA, 10 bp, Artificial Sequence
  Synthetic Polynucleotide
tgcagtttgg

SEQ ID NO: 1742 - DNA, 10 bp, Artificial Sequence
  Synthetic Polynucleotide
cgttgaccaa

SEQ ID NO: 1743 - DNA, 10 bp, Artificial Sequence
  Synthetic Polynucleotide
aaggagcagg

SEQ ID NO: 1744 - DNA, 10 bp, Artificial Sequence
  Synthetic Polynucleotide
tgcaggatca

SEQ ID NO: 1745 - DNA, 10 bp, Artificial Sequence
  Synthetic Polynucleotide
tggggcaaat

SEQ ID NO: 1746 - DNA, 10 bp, Artificial Sequence
  Synthetic Polynucleotide
tcccttgctg

SEQ ID NO: 1747 - DNA, 10 bp, Artificial Sequence
  Synthetic Polynucleotide
agggatcgga

SEQ ID NO: 1748 - DNA, 10 bp, Artificial Sequence
  Synthetic Polynucleotide
tgcaggagtt

SEQ ID NO: 1749 - DNA, 10 bp, Artificial Sequence
  Synthetic Polynucleotide
aagaggctgc

SEQ ID NO: 1750 - DNA, 10 bp, Artificial Sequence
  Synthetic Polynucleotide
tgcaccactc

SEQ ID NO: 1751 - DNA, 10 bp, Artificial Sequence
  Synthetic Polynucleotide
gcctgggaag

SEQ ID NO: 1752 - DNA, 10 bp, Artificial Sequence
  Synthetic Polynucleotide
tgggtctcct

SEQ ID NO: 1753 - DNA, 10 bp, Artificial Sequence
  Synthetic Polynucleotide
gttcagggtg

SEQ ID NO: 1754 - DNA, 10 bp, Artificial Sequence
  Synthetic Polynucleotide
gctcctctcc

SEQ ID NO: 1755 - DNA, 10 bp, Artificial Sequence
  Synthetic Polynucleotide
atgccgcagc

SEQ ID NO: 1756 - DNA, 10 bp, Artificial Sequence
  Synthetic Polynucleotide
tctgaccaga

SEQ ID NO: 1757 - DNA, 10 bp, Artificial Sequence
  Synthetic Polynucleotide
atgggaggga

SEQ ID NO: 1758 - DNA, 10 bp, Artificial Sequence
  Synthetic Polynucleotide
gctgtcaccc

SEQ ID NO: 1759 - DNA, 10 bp, Artificial Sequence
  Synthetic Polynucleotide
tgcaacaggg

SEQ ID NO: 1760 - DNA, 10 bp, Artificial Sequence
  Synthetic Polynucleotide
gcagtcatgc

SEQ ID NO: 1761 - DNA, 10 bp, Artificial Sequence
  Synthetic Polynucleotide
tcgtccccga

SEQ ID NO: 1762 - DNA, 10 bp, Artificial Sequence
  Synthetic Polynucleotide
tctcagtcgg

SEQ ID NO: 1763 - DNA, 10 bp, Artificial Sequence
  Synthetic Polynucleotide
cggacaaacc

SEQ ID NO: 1764 - DNA, 10 bp, Artificial Sequence
  Synthetic Polynucleotide
tcccacatgg

SEQ ID NO: 1765 - DNA, 10 bp, Artificial Sequence
  Synthetic Polynucleotide
agaagtgcga

SEQ ID NO: 1766 - DNA, 10 bp, Artificial Sequence
  Synthetic Polynucleotide
ggtagacgga

SEQ ID NO: 1767 - DNA, 10 bp, Artificial Sequence
  Synthetic Polynucleotide
atcaacccca

SEQ ID NO: 1768 - DNA, 10 bp, Artificial Sequence
  Synthetic Polynucleotide
gcggttttcg

SEQ ID NO: 1769 - DNA, 10 bp, Artificial Sequence
  Synthetic Polynucleotide
agatgctcgg

SEQ ID NO: 1770 - DNA, 10 bp, Artificial Sequence
  Synthetic Polynucleotide
ctgaaccagc

SEQ ID NO: 1771 - DNA, 10 bp, Artificial Sequence
  Synthetic Polynucleotide
cgccctgctc

SEQ ID NO: 1772 - DNA, 10 bp, Artificial Sequence
  Synthetic Polynucleotide
ttcagtcgcg

SEQ ID NO: 1773 - DNA, 10 bp, Artificial Sequence
  Synthetic Polynucleotide
tcggcacctg

SEQ ID NO: 1774 - DNA, 10 bp, Artificial Sequence
  Synthetic Polynucleotide
accagtcgat

SEQ ID NO: 1775 - DNA, 10 bp, Artificial Sequence
  Synthetic Polynucleotide
cgaatgctgt

SEQ ID NO: 1776 - DNA, 10 bp, Artificial Sequence
  Synthetic Polynucleotide
ccaaagaccg

SEQ ID NO: 1777 - DNA, 10 bp, Artificial Sequence
  Synthetic Polynucleotide
tggctcttgg

SEQ ID NO: 1778 - DNA, 10 bp, Artificial Sequence
  Synthetic Polynucleotide
gcatagacgg

SEQ ID NO: 1779 - DNA, 10 bp, Artificial Sequence
  Synthetic Polynucleotide
gctacccctt

SEQ ID NO: 1780 - DNA, 10 bp, Artificial Sequence
  Synthetic Polynucleotide
cacggttggc

SEQ ID NO: 1781 - DNA, 10 bp, Artificial Sequence
  Synthetic Polynucleotide
tcaccaaggt

SEQ ID NO: 1782 - DNA, 10 bp, Artificial Sequence
  Synthetic Polynucleotide
tcttcacgac

SEQ ID NO: 1783 - DNA, 10 bp, Artificial Sequence
  Synthetic Polynucleotide
cgttcaacgc

SEQ ID NO: 1784 - DNA, 10 bp, Artificial Sequence
  Synthetic Polynucleotide
actctggagg

SEQ ID NO: 1785 - DNA, 10 bp, Artificial Sequence
  Synthetic Polynucleotide
ccctacgcta

SEQ ID NO: 1786 - DNA, 10 bp, Artificial Sequence
  Synthetic Polynucleotide
tcacgagaga

SEQ ID NO: 1787 - DNA, 10 bp, Artificial Sequence
  Synthetic Polynucleotide
tgctccttgg

SEQ ID NO: 1788 - DNA, 10 bp, Artificial Sequence
  Synthetic Polynucleotide
ggtgcaacat

SEQ ID NO: 1789 - DNA, 10 bp, Artificial Sequence
  Synthetic Polynucleotide
gctaagccct

SEQ ID NO: 1790 - DNA, 10 bp, Artificial Sequence
  Synthetic Polynucleotide
ggtacgctcc

SEQ ID NO: 1791 - DNA, 10 bp, Artificial Sequence
  Synthetic Polynucleotide
tttcccagct

SEQ ID NO: 1792 - DNA, 10 bp, Artificial Sequence
  Synthetic Polynucleotide
cgtcaaacga

SEQ ID NO: 1793 - DNA, 10 bp, Artificial Sequence
  Synthetic Polynucleotide
ttcggtcgta

SEQ ID NO: 1794 - DNA, 10 bp, Artificial Sequence
  Synthetic Polynucleotide
tgagcttcgg

SEQ ID NO: 1795 - DNA, 10 bp, Artificial Sequence
  Synthetic Polynucleotide
gcttttccca

SEQ ID NO: 1796 - DNA, 10 bp, Artificial Sequence
  Synthetic Polynucleotide
gtttgggtcg

SEQ ID NO: 1797 - DNA, 10 bp, Artificial Sequence
  Synthetic Polynucleotide
cgcccgatct

SEQ ID NO: 1798 - DNA, 10 bp, Artificial Sequence
  Synthetic Polynucleotide
cggattggcg

SEQ ID NO: 1799 - DNA, 10 bp, Artificial Sequence
  Synthetic Polynucleotide
tcacccgtca

SEQ ID NO: 1800 - DNA, 10 bp, Artificial Sequence
  Synthetic Polynucleotide
aatggctcgc

SEQ ID NO: 1801 - DNA, 10 bp, Artificial Sequence
  Synthetic Polynucleotide
ccggtgttcc

SEQ ID NO: 1802 - DNA, 10 bp, Artificial Sequence
  Synthetic Polynucleotide
agcagcactc

SEQ ID NO: 1803 - DNA, 10 bp, Artificial Sequence
  Synthetic Polynucleotide
tcatgcctct

SEQ ID NO: 1804 - DNA, 10 bp, Artificial Sequence
  Synthetic Polynucleotide
tacggcacca

SEQ ID NO: 1805 - DNA, 10 bp, Artificial Sequence
  Synthetic Polynucleotide
gcttcctgtc

SEQ ID NO: 1806 - DNA, 10 bp, Artificial Sequence
  Synthetic Polynucleotide
tctccttggt

SEQ ID NO: 1807 - DNA, 10 bp, Artificial Sequence
  Synthetic Polynucleotide
gtgcttggtt

SEQ ID NO: 1808 - DNA, 10 bp, Artificial Sequence
  Synthetic Polynucleotide
taggctgtct

SEQ ID NO: 1809 - DNA, 10 bp, Artificial Sequence
  Synthetic Polynucleotide
atcagccacc

SEQ ID NO: 1810 - DNA, 10 bp, Artificial Sequence
  Synthetic Polynucleotide
ggcagtggaa

SEQ ID NO: 1811 - DNA, 10 bp, Artificial Sequence
  Synthetic Polynucleotide
gcattgcgat

SEQ ID NO: 1812 - DNA, 10 bp, Artificial Sequence
  Synthetic Polynucleotide
gcttgtcctc

SEQ ID NO: 1813 - DNA, 10 bp, Artificial Sequence
  Synthetic Polynucleotide
gaagcaggac

SEQ ID NO: 1814 - DNA, 10 bp, Artificial Sequence
  Synthetic Polynucleotide
ggtcttcgga

SEQ ID NO: 1815 - DNA, 10 bp, Artificial Sequence
  Synthetic Polynucleotide
gtcgtcgtcg

SEQ ID NO: 1816 - DNA, 10 bp, Artificial Sequence
  Synthetic Polynucleotide
cctcccacca

SEQ ID NO: 1817 - DNA, 10 bp, Artificial Sequence
  Synthetic Polynucleotide
atcaaggccg

SEQ ID NO: 1818 - DNA, 10 bp, Artificial Sequence
  Synthetic Polynucleotide
tcccacccac

SEQ ID NO: 1819 - DNA, 10 bp, Artificial Sequence
  Synthetic Polynucleotide
ctttgccggg

SEQ ID NO: 1820 - DNA, 10 bp, Artificial Sequence
  Synthetic Polynucleotide
acgcctcaaa

SEQ ID NO: 1821 - DNA, 10 bp, Artificial Sequence
  Synthetic Polynucleotide
gcttaccacc

SEQ ID NO: 1822 - DNA, 10 bp, Artificial Sequence
  Synthetic Polynucleotide
ctcctccagc

SEQ ID NO: 1823 - DNA, 10 bp, Artificial Sequence
  Synthetic Polynucleotide
aaaagagcgc

SEQ ID NO: 1824 - DNA, 10 bp, Artificial Sequence
  Synthetic Polynucleotide
tcgataccgt

SEQ ID NO: 1825 - DNA, 10 bp, Artificial Sequence
  Synthetic Polynucleotide
ccacatccac

SEQ ID NO: 1826 - DNA, 10 bp, Artificial Sequence
  Synthetic Polynucleotide
gtggcggtgt

SEQ ID NO: 1827 - DNA, 10 bp, Artificial Sequence
  Synthetic Polynucleotide
gcttggagca

SEQ ID NO: 1828 - DNA, 10 bp, Artificial Sequence
  Synthetic Polynucleotide
ctggggcggt

SEQ ID NO: 1829 - DNA, 10 bp, Artificial Sequence
  Synthetic Polynucleotide
gggcggtata

SEQ ID NO: 1830 - DNA, 10 bp, Artificial Sequence
  Synthetic Polynucleotide
aatctgcgac

SEQ ID NO: 1831 - DNA, 10 bp, Artificial Sequence
  Synthetic Polynucleotide
atgcgaaccg

SEQ ID NO: 1832 - DNA, 10 bp, Artificial Sequence
  Synthetic Polynucleotide
gctgttggag

SEQ ID NO: 1833 - DNA, 10 bp, Artificial Sequence
  Synthetic Polynucleotide
tcctcctcca

SEQ ID NO: 1834 - DNA, 10 bp, Artificial Sequence
  Synthetic Polynucleotide
tgtggtgttg

SEQ ID NO: 1835 - DNA, 10 bp, Artificial Sequence
  Synthetic Polynucleotide
tgcaacgagt

SEQ ID NO: 1836 - DNA, 10 bp, Artificial Sequence
  Synthetic Polynucleotide
ctcctcctgt

SEQ ID NO: 1837 - DNA, 10 bp, Artificial Sequence
  Synthetic Polynucleotide
tgctagtggg

SEQ ID NO: 1838 - DNA, 10 bp, Artificial Sequence
  Synthetic Polynucleotide
ggatcgttcc

SEQ ID NO: 1839 - DNA, 10 bp, Artificial Sequence
  Synthetic Polynucleotide
tatgcgagta

SEQ ID NO: 1840 - DNA, 10 bp, Artificial Sequence
  Synthetic Polynucleotide
acaaaacgcc

SEQ ID NO: 1841 - DNA, 10 bp, Artificial Sequence
  Synthetic Polynucleotide
gcaaacctga

SEQ ID NO: 1842 - DNA, 10 bp, Artificial Sequence
  Synthetic Polynucleotide
acttgccgtt

SEQ ID NO: 1843 - DNA, 10 bp, Artificial Sequence
  Synthetic Polynucleotide
aatgtcagcg

SEQ ID NO: 1844 - DNA, 10 bp, Artificial Sequence
  Synthetic Polynucleotide
ctgccaccac

SEQ ID NO: 1845 - DNA, 10 bp, Artificial Sequence
  Synthetic Polynucleotide
cctctgtccg

SEQ ID NO: 1846 - DNA, 10 bp, Artificial Sequence
  Synthetic Polynucleotide
gtcggttccg

SEQ ID NO: 1847 - DNA, 10 bp, Artificial Sequence
  Synthetic Polynucleotide
tccggcccct

SEQ ID NO: 1848 - DNA, 10 bp, Artificial Sequence
  Synthetic Polynucleotide
ggcgttcacc

SEQ ID NO: 1849 - DNA, 10 bp, Artificial Sequence
  Synthetic Polynucleotide
gccgtgggac

SEQ ID NO: 1850 - DNA, 10 bp, Artificial Sequence
  Synthetic Polynucleotide
accttctggg

SEQ ID NO: 1851 - DNA, 10 bp, Artificial Sequence
  Synthetic Polynucleotide
ggccaaaagc

SEQ ID NO: 1852 - DNA, 10 bp, Artificial Sequence
  Synthetic Polynucleotide
cagccctgac

SEQ ID NO: 1853 - DNA, 10 bp, Artificial Sequence
  Synthetic Polynucleotide
cctcaccgcc

SEQ ID NO: 1854 - DNA, 10 bp, Artificial Sequence
  Synthetic Polynucleotide
ggtcgagttg

SEQ ID NO: 1855 - DNA, 10 bp, Artificial Sequence
  Synthetic Polynucleotide
cagtgttgct

SEQ ID NO: 1856 - DNA, 10 bp, Artificial Sequence
  Synthetic Polynucleotide
ccatgttgcc

SEQ ID NO: 1857 - DNA, 10 bp, Artificial Sequence
  Synthetic Polynucleotide
gggttccgct

SEQ ID NO: 1858 - DNA, 10 bp, Artificial Sequence
  Synthetic Polynucleotide
cgtggttgga

SEQ ID NO: 1859 - DNA, 10 bp, Artificial Sequence
  Synthetic Polynucleotide
ggacacccaa

SEQ ID NO: 1860 - DNA, 10 bp, Artificial Sequence
  Synthetic Polynucleotide
tctgttccgc

SEQ ID NO: 1861 - DNA, 10 bp, Artificial Sequence
  Synthetic Polynucleotide
cgcctgtttt

SEQ ID NO: 1862 - DNA, 10 bp, Artificial Sequence
  Synthetic Polynucleotide
gggcatcctt

SEQ ID NO: 1863 - DNA, 10 bp, Artificial Sequence
  Synthetic Polynucleotide
gccgaaagcc

SEQ ID NO: 1864 - DNA, 10 bp, Artificial Sequence
  Synthetic Polynucleotide
ccgaggagca

SEQ ID NO: 1865 - DNA, 10 bp, Artificial Sequence
  Synthetic Polynucleotide
tacccctgga

SEQ ID NO: 1866 - DNA, 10 bp, Artificial Sequence
  Synthetic Polynucleotide
ccaccaacct

SEQ ID NO: 1867 - DNA, 10 bp, Artificial Sequence
  Synthetic Polynucleotide
tgtgccaaag

SEQ ID NO: 1868 - DNA, 10 bp, Artificial Sequence
  Synthetic Polynucleotide
tcaccaacca

SEQ ID NO: 1869 - DNA, 10 bp, Artificial Sequence
  Synthetic Polynucleotide
caacctgcca

SEQ ID NO: 1870 - DNA, 10 bp, Artificial Sequence
  Synthetic Polynucleotide
tccactgagt

SEQ ID NO: 1871 - DNA, 10 bp, Artificial Sequence
  Synthetic Polynucleotide
atgccagcaa

SEQ ID NO: 1872 - DNA, 10 bp, Artificial Sequence
  Synthetic Polynucleotide
ccctgatgga

SEQ ID NO: 1873 - DNA, 10 bp, Artificial Sequence
  Synthetic Polynucleotide
ccaggtccct

SEQ ID NO: 1874 - DNA, 10 bp, Artificial Sequence
  Synthetic Polynucleotide
ccattgtgcc

SEQ ID NO: 1875 - DNA, 10 bp, Artificial Sequence
  Synthetic Polynucleotide
tgccagcttg

SEQ ID NO: 1876 - DNA, 10 bp, Artificial Sequence
  Synthetic Polynucleotide
tgtcgccaag

SEQ ID NO: 1877 - DNA, 10 bp, Artificial Sequence
  Synthetic Polynucleotide
tggctccacg

SEQ ID NO: 1878 - DNA, 10 bp, Artificial Sequence
  Synthetic Polynucleotide
aacccatgcc

SEQ ID NO: 1879 - DNA, 10 bp, Artificial Sequence
  Synthetic Polynucleotide
agccctcaac

SEQ ID NO: 1880 - DNA, 10 bp, Artificial Sequence
  Synthetic Polynucleotide
accttgggct

SEQ ID NO: 1881 - DNA, 10 bp, Artificial Sequence
  Synthetic Polynucleotide
atacacccgt

SEQ ID NO: 1882 - DNA, 10 bp, Artificial Sequence
  Synthetic Polynucleotide
tctcacgggc

SEQ ID NO: 1883 - DNA, 10 bp, Artificial Sequence
  Synthetic Polynucleotide
ttggtgctgg

SEQ ID NO: 1884 - DNA, 10 bp, Artificial Sequence
  Synthetic Polynucleotide
ctctccggta

SEQ ID NO: 1885 - DNA, 10 bp, Artificial Sequence
  Synthetic Polynucleotide
gcatccagtg

SEQ ID NO: 1886 - DNA, 10 bp, Artificial Sequence
  Synthetic Polynucleotide
ttgccgatga

SEQ ID NO: 1887 - DNA, 10 bp, Artificial Sequence
  Synthetic Polynucleotide
gccctggaag

SEQ ID NO: 1888 - DNA, 10 bp, Artificial Sequence
  Synthetic Polynucleotide
tggcatcctt

SEQ ID NO: 1889 - DNA, 10 bp, Artificial Sequence
  Synthetic Polynucleotide
tgagccatgt

SEQ ID NO: 1890 - DNA, 10 bp, Artificial Sequence
  Synthetic Polynucleotide
tctgaccacc

SEQ ID NO: 1891 - DNA, 10 bp, Artificial Sequence
  Synthetic Polynucleotide
tgccgcaggt

SEQ ID NO: 1892 - DNA, 10 bp, Artificial Sequence
  Synthetic Polynucleotide
tcccactcaa

SEQ ID NO: 1893 - DNA, 10 bp, Artificial Sequence
  Synthetic Polynucleotide
ggtgctggcg

SEQ ID NO: 1894 - DNA, 10 bp, Artificial Sequence
  Synthetic Polynucleotide
cgatgtcctg

SEQ ID NO: 1895 - DNA, 10 bp, Artificial Sequence
  Synthetic Polynucleotide
ccagttgcag

SEQ ID NO: 1896 - DNA, 10 bp, Artificial Sequence
  Synthetic Polynucleotide
tcaagggtga

SEQ ID NO: 1897 - DNA, 10 bp, Artificial Sequence
  Synthetic Polynucleotide
taaacggtgg

SEQ ID NO: 1898 - DNA, 10 bp, Artificial Sequence
  Synthetic Polynucleotide
acaacaagcc

SEQ ID NO: 1899 - DNA, 10 bp, Artificial Sequence
  Synthetic Polynucleotide
gcagttggac

SEQ ID NO: 1900 - DNA, 10 bp, Artificial Sequence
  Synthetic Polynucleotide
agcttcacca

SEQ ID NO: 1901 - DNA, 10 bp, Artificial Sequence
  Synthetic Polynucleotide
tgaacaacga

SEQ ID NO: 1902 - DNA, 10 bp, Artificial Sequence
  Synthetic Polynucleotide
tttacccgct

SEQ ID NO: 1903 - DNA, 10 bp, Artificial Sequence
  Synthetic Polynucleotide
cgtgggcttg

SEQ ID NO: 1904 - DNA, 10 bp, Artificial Sequence
  Synthetic Polynucleotide
tgcagcgtct

SEQ ID NO: 1905 - DNA, 10 bp, Artificial Sequence
  Synthetic Polynucleotide
acccagacgc

SEQ ID NO: 1906 - DNA, 10 bp, Artificial Sequence
  Synthetic Polynucleotide
gccgcatgaa

SEQ ID NO: 1907 - DNA, 10 bp, Artificial Sequence
  Synthetic Polynucleotide
gaagactggc

SEQ ID NO: 1908 - DNA, 10 bp, Artificial Sequence
  Synthetic Polynucleotide
acaatggcac

SEQ ID NO: 1909 - DNA, 10 bp, Artificial Sequence
  Synthetic Polynucleotide
tcctgcttct

SEQ ID NO: 1910 - DNA, 10 bp, Artificial Sequence
  Synthetic Polynucleotide
gctggcgtaa

SEQ ID NO: 1911 - DNA, 10 bp, Artificial Sequence
  Synthetic Polynucleotide
gcagcaacaa

SEQ ID NO: 1912 - DNA, 10 bp, Artificial Sequence
  Synthetic Polynucleotide
caatctggca

SEQ ID NO: 1913 - DNA, 10 bp, Artificial Sequence
  Synthetic Polynucleotide
tctcctcctg

SEQ ID NO: 1914 - DNA, 10 bp, Artificial Sequence
  Synthetic Polynucleotide
gcttgaacca

SEQ ID NO: 1915 - DNA, 10 bp, Artificial Sequence
  Synthetic Polynucleotide
actgcgttct

SEQ ID NO: 1916 - DNA, 10 bp, Artificial Sequence
  Synthetic Polynucleotide
tggctgtggt

SEQ ID NO: 1917 - DNA, 10 bp, Artificial Sequence
  Synthetic Polynucleotide
tgtggcgggt

SEQ ID NO: 1918 - DNA, 10 bp, Artificial Sequence
  Synthetic Polynucleotide
tgtggcgagt

SEQ ID NO: 1919 - DNA, 10 bp, Artificial Sequence
  Synthetic Polynucleotide
tgccgtggtc

SEQ ID NO: 1920 - DNA, 10 bp, Artificial Sequence
  Synthetic Polynucleotide
taggcttgta

SEQ ID NO: 1921 - DNA, 10 bp, Artificial Sequence
  Synthetic Polynucleotide
tccaacgagc

SEQ ID NO: 1922 - DNA, 10 bp, Artificial Sequence
  Synthetic Polynucleotide
ggctgtggta

SEQ ID NO: 1923 - DNA, 10 bp, Artificial Sequence
  Synthetic Polynucleotide
ccaacgagtc

SEQ ID NO: 1924 - DNA, 10 bp, Artificial Sequence
  Synthetic Polynucleotide
tgtgaagcgg

SEQ ID NO: 1925 - DNA, 10 bp, Artificial Sequence
  Synthetic Polynucleotide
agtccgagct

SEQ ID NO: 1926 - DNA, 10 bp, Artificial Sequence
  Synthetic Polynucleotide
tgtggcgagc

SEQ ID NO: 1927 - DNA, 10 bp, Artificial Sequence
  Synthetic Polynucleotide
tggcgggtgt

SEQ ID NO: 1928 - DNA, 10 bp, Artificial Sequence
  Synthetic Polynucleotide
agtgtggcag

SEQ ID NO: 1929 - DNA, 10 bp, Artificial Sequence
  Synthetic Polynucleotide
tagcacttga

SEQ ID NO: 1930 - DNA, 10 bp, Artificial Sequence
  Synthetic Polynucleotide
acgagcactg

SEQ ID NO: 1931 - DNA, 10 bp, Artificial Sequence
  Synthetic Polynucleotide
ccgaaagtga

SEQ ID NO: 1932 - DNA, 10 bp, Artificial Sequence
  Synthetic Polynucleotide
cattgctgga

SEQ ID NO: 1933 - DNA, 10 bp, Artificial Sequence
  Synthetic Polynucleotide
tacttgctga

SEQ ID NO: 1934 - DNA, 10 bp, Artificial Sequence
  Synthetic Polynucleotide
actttgcgtt

SEQ ID NO: 1935 - DNA, 10 bp, Artificial Sequence
  Synthetic Polynucleotide
accagaacca

SEQ ID NO: 1936 - DNA, 10 bp, Artificial Sequence
  Synthetic Polynucleotide
gggaaggagg

SEQ ID NO: 1937 - DNA, 10 bp, Artificial Sequence
  Synthetic Polynucleotide
aaacgggact

SEQ ID NO: 1938 - DNA, 10 bp, Artificial Sequence
  Synthetic Polynucleotide
aacgttgcag

SEQ ID NO: 1939 - DNA, 10 bp, Artificial Sequence
  Synthetic Polynucleotide
ttcggcttga

SEQ ID NO: 1940 - DNA, 10 bp, Artificial Sequence
  Synthetic Polynucleotide
acagccacga

SEQ ID NO: 1941 - DNA, 10 bp, Artificial Sequence
  Synthetic Polynucleotide
ttttgcgaca

SEQ ID NO: 1942 - DNA, 10 bp, Artificial Sequence
  Synthetic Polynucleotide
acgttcttcg

SEQ ID NO: 1943 - DNA, 10 bp, Artificial Sequence
  Synthetic Polynucleotide
tggttgcagt

SEQ ID NO: 1944 - DNA, 10 bp, Artificial Sequence
  Synthetic Polynucleotide
acacgtcacg

SEQ ID NO: 1945 - DNA, 10 bp, Artificial Sequence
  Synthetic Polynucleotide
gcgaacacaa

SEQ ID NO: 1946 - DNA, 10 bp, Artificial Sequence
  Synthetic Polynucleotide
cttcacgctg

SEQ ID NO: 1947 - DNA, 10 bp, Artificial Sequence
  Synthetic Polynucleotide
cacacactga

SEQ ID NO: 1948 - DNA, 10 bp, Artificial Sequence
  Synthetic Polynucleotide
ttcgtcagct

SEQ ID NO: 1949 - DNA, 10 bp, Artificial Sequence
  Synthetic Polynucleotide
cacggagcag

SEQ ID NO: 1950 - DNA, 10 bp, Artificial Sequence
  Synthetic Polynucleotide
tccatttgca

SEQ ID NO: 1951 - DNA, 10 bp, Artificial Sequence
  Synthetic Polynucleotide
gtttggcaga

SEQ ID NO: 1952 - DNA, 10 bp, Artificial Sequence
  Synthetic Polynucleotide
cacagcacaa

SEQ ID NO: 1953 - DNA, 10 bp, Artificial Sequence
  Synthetic Polynucleotide
aaacccacgt

SEQ ID NO: 1954 - DNA, 10 bp, Artificial Sequence
  Synthetic Polynucleotide
tgtggggcaa

SEQ ID NO: 1955 - DNA, 10 bp, Artificial Sequence
  Synthetic Polynucleotide
acgtcgttcc

SEQ ID NO: 1956 - DNA, 10 bp, Artificial Sequence
  Synthetic Polynucleotide
gcacgtacac

SEQ ID NO: 1957 - DNA, 10 bp, Artificial Sequence
  Synthetic Polynucleotide
acaagctgct

SEQ ID NO: 1958 - DNA, 10 bp, Artificial Sequence
  Synthetic Polynucleotide
ccacggattg

SEQ ID NO: 1959 - DNA, 10 bp, Artificial Sequence
  Synthetic Polynucleotide
gaccacgccg

SEQ ID NO: 1960 - DNA, 10 bp, Artificial Sequence
  Synthetic Polynucleotide
agcatcacga

SEQ ID NO: 1961 - DNA, 10 bp, Artificial Sequence
  Synthetic Polynucleotide
gctgcaccac

SEQ ID NO: 1962 - DNA, 10 bp, Artificial Sequence
  Synthetic Polynucleotide
ggcatcatcg

SEQ ID NO: 1963 - DNA, 10 bp, Artificial Sequence
  Synthetic Polynucleotide
gcacgtcttg

SEQ ID NO: 1964 - DNA, 10 bp, Artificial Sequence
  Synthetic Polynucleotide
cgagacttgc

SEQ ID NO: 1965 - DNA, 10 bp, Artificial Sequence
  Synthetic Polynucleotide
aagctgccgt

SEQ ID NO: 1966 - DNA, 10 bp, Artificial Sequence
  Synthetic Polynucleotide
tgccaagcct

SEQ ID NO: 1967 - DNA, 10 bp, Artificial Sequence
  Synthetic Polynucleotide
ccacagccac

SEQ ID NO: 1968 - DNA, 10 bp, Artificial Sequence
  Synthetic Polynucleotide
gaaccacacg

SEQ ID NO: 1969 - DNA, 10 bp, Artificial Sequence
  Synthetic Polynucleotide
gacagttgca

SEQ ID NO: 1970 - DNA, 10 bp, Artificial Sequence
  Synthetic Polynucleotide
accgaagtct

SEQ ID NO: 1971 - DNA, 10 bp, Artificial Sequence
  Synthetic Polynucleotide
acacgtcgtc

SEQ ID NO: 1972 - DNA, 10 bp, Artificial Sequence
  Synthetic Polynucleotide
tgaggtttgc

SEQ ID NO: 1973 - DNA, 10 bp, Artificial Sequence
  Synthetic Polynucleotide
aagccatgca

SEQ ID NO: 1974 - DNA, 10 bp, Artificial Sequence
  Synthetic Polynucleotide
tctgcgaacg

SEQ ID NO: 1975 - DNA, 10 bp, Artificial Sequence
  Synthetic Polynucleotide
acgagaagga

SEQ ID NO: 1976 - DNA, 10 bp, Artificial Sequence
  Synthetic Polynucleotide
cgaaccacgc

SEQ ID NO: 1977 - DNA, 10 bp, Artificial Sequence
  Synthetic Polynucleotide
gcaaagttgc

SEQ ID NO: 1978 - DNA, 10 bp, Artificial Sequence
  Synthetic Polynucleotide
ttgcaaccgg

SEQ ID NO: 1979 - DNA, 10 bp, Artificial Sequence
  Synthetic Polynucleotide
ctgccaaacc

SEQ ID NO: 1980 - DNA, 10 bp, Artificial Sequence
  Synthetic Polynucleotide
agtcgtcgaa

SEQ ID NO: 1981 - DNA, 10 bp, Artificial Sequence
  Synthetic Polynucleotide
tcgtcgagac

SEQ ID NO: 1982 - DNA, 10 bp, Artificial Sequence
  Synthetic Polynucleotide
ctgccacacc

SEQ ID NO: 1983 - DNA, 10 bp, Artificial Sequence
  Synthetic Polynucleotide
tcgctgacgt

SEQ ID NO: 1984 - DNA, 10 bp, Artificial Sequence
  Synthetic Polynucleotide
gcacatgacg

SEQ ID NO: 1985 - DNA, 10 bp, Artificial Sequence
  Synthetic Polynucleotide
cgcaagtacg

SEQ ID NO: 1986 - DNA, 10 bp, Artificial Sequence
  Synthetic Polynucleotide
ccatcgtgca

SEQ ID NO: 1987 - DNA, 10 bp, Artificial Sequence
  Synthetic Polynucleotide
gcaaagctcc

SEQ ID NO: 1988 - DNA, 10 bp, Artificial Sequence
  Synthetic Polynucleotide
gcaggtacac

SEQ ID NO: 1989 - DNA, 10 bp, Artificial Sequence
  Synthetic Polynucleotide
cgcactgaaa

SEQ ID NO: 1990 - DNA, 10 bp, Artificial Sequence
  Synthetic Polynucleotide
gtgcatcgga

SEQ ID NO: 1991 - DNA, 10 bp, Artificial Sequence
  Synthetic Polynucleotide
cgagcaagtg

SEQ ID NO: 1992 - DNA, 10 bp, Artificial Sequence
  Synthetic Polynucleotide
gctcgccaca

SEQ ID NO: 1993 - DNA, 10 bp, Artificial Sequence
  Synthetic Polynucleotide
tcaagcaccc

SEQ ID NO: 1994 - DNA, 10 bp, Artificial Sequence
  Synthetic Polynucleotide
gggctcagaa

SEQ ID NO: 1995 - DNA, 10 bp, Artificial Sequence
  Synthetic Polynucleotide
ctgttttgcg

SEQ ID NO: 1996 - DNA, 10 bp, Artificial Sequence
  Synthetic Polynucleotide
ttgtcgcctt

SEQ ID NO: 1997 - DNA, 10 bp, Artificial Sequence
  Synthetic Polynucleotide
aacgtgcatc

SEQ ID NO: 1998 - DNA, 10 bp, Artificial Sequence
  Synthetic Polynucleotide
acagcgactc

SEQ ID NO: 1999 - DNA, 10 bp, Artificial Sequence
  Synthetic Polynucleotide
cgggtgtttc

SEQ ID NO: 2000 - DNA, 10 bp, Artificial Sequence
  Synthetic Polynucleotide
tgacgaccga

SEQ ID NO: 2001 - DNA, 10 bp, Artificial Sequence
  Synthetic Polynucleotide
aagtccggtt

SEQ ID NO: 2002 - DNA, 10 bp, Artificial Sequence
  Synthetic Polynucleotide
tgggttgtga

SEQ ID NO: 2003 - DNA, 10 bp, Artificial Sequence
  Synthetic Polynucleotide
ctctcgggat

SEQ ID NO: 2004 - DNA, 10 bp, Artificial Sequence
  Synthetic Polynucleotide
cgacgtgcct

SEQ ID NO: 2005 - DNA, 10 bp, Artificial Sequence
  Synthetic Polynucleotide
ttcgcaaaga

SEQ ID NO: 2006 - DNA, 10 bp, Artificial Sequence
  Synthetic Polynucleotide
gtgggttcgt

SEQ ID NO: 2007 - DNA, 10 bp, Artificial Sequence
  Synthetic Polynucleotide
cgcgtggtaa

SEQ ID NO: 2008 - DNA, 10 bp, Artificial Sequence
  Synthetic Polynucleotide
ttcgcagcat

SEQ ID NO: 2009 - DNA, 10 bp, Artificial Sequence
  Synthetic Polynucleotide
aaccagtgcc

SEQ ID NO: 2010 - DNA, 10 bp, Artificial Sequence
  Synthetic Polynucleotide
tagaacgtgc

SEQ ID NO: 2011 - DNA, 10 bp, Artificial Sequence
  Synthetic Polynucleotide
gtcattggca

SEQ ID NO: 2012 - DNA, 10 bp, Artificial Sequence
  Synthetic Polynucleotide
ccagcgtgaa

SEQ ID NO: 2013 - DNA, 10 bp, Artificial Sequence
  Synthetic Polynucleotide
catcttcgca

SEQ ID NO: 2014 - DNA, 10 bp, Artificial Sequence
  Synthetic Polynucleotide
agcaacggaa

SEQ ID NO: 2015 - DNA, 10 bp, Artificial Sequence
  Synthetic Polynucleotide
gctgaggagc

SEQ ID NO: 2016 - DNA, 10 bp, Artificial Sequence
  Synthetic Polynucleotide
tgttggacgc

SEQ ID NO: 2017 - DNA, 10 bp, Artificial Sequence
  Synthetic Polynucleotide
tggcacgggc

SEQ ID NO: 2018 - DNA, 10 bp, Artificial Sequence
  Synthetic Polynucleotide
ttgtggcgaa

SEQ ID NO: 2019 - DNA, 10 bp, Artificial Sequence
  Synthetic Polynucleotide
cgatgcagca

SEQ ID NO: 2020 - DNA, 10 bp, Artificial Sequence
  Synthetic Polynucleotide
atgtggcgat

SEQ ID NO: 2021 - DNA, 10 bp, Artificial Sequence
  Synthetic Polynucleotide
aattgcgtca

SEQ ID NO: 2022 - DNA, 10 bp, Artificial Sequence
  Synthetic Polynucleotide
acacactgct

SEQ ID NO: 2023 - DNA, 10 bp, Artificial Sequence
  Synthetic Polynucleotide
gttcacacgt

SEQ ID NO: 2024 - DNA, 10 bp, Artificial Sequence
  Synthetic Polynucleotide
gcaagtctcg

SEQ ID NO: 2025 - DNA, 10 bp, Artificial Sequence
  Synthetic Polynucleotide
cttgtgtcga

SEQ ID NO: 2026 - DNA, 10 bp, Artificial Sequence
  Synthetic Polynucleotide
cgttgactgt

SEQ ID NO: 2027 - DNA, 10 bp, Artificial Sequence
  Synthetic Polynucleotide
ttctcgtggc

SEQ ID NO: 2028 - DNA, 10 bp, Artificial Sequence
  Synthetic Polynucleotide
tggcgggtta

SEQ ID NO: 2029 - DNA, 10 bp, Artificial Sequence
  Synthetic Polynucleotide
tcaaccacct

SEQ ID NO: 2030 - DNA, 10 bp, Artificial Sequence
  Synthetic Polynucleotide
ctgtcacgta

SEQ ID NO: 2031 - DNA, 10 bp, Artificial Sequence
  Synthetic Polynucleotide
gcaatgtcca

SEQ ID NO: 2032 - DNA, 10 bp, Artificial Sequence
  Synthetic Polynucleotide
tgtagcgact

SEQ ID NO: 2033 - DNA, 10 bp, Artificial Sequence
  Synthetic Polynucleotide
gtagccgagt

SEQ ID NO: 2034 - DNA, 10 bp, Artificial Sequence
  Synthetic Polynucleotide
gctcgatggt

SEQ ID NO: 2035 - DNA, 10 bp, Artificial Sequence
  Synthetic Polynucleotide
tcacggtcat

SEQ ID NO: 2036 - DNA, 10 bp, Artificial Sequence
  Synthetic Polynucleotide
cgtagtcacg

SEQ ID NO: 2037 - DNA, 10 bp, Artificial Sequence
  Synthetic Polynucleotide
gttcgccaat

SEQ ID NO: 2038 - DNA, 10 bp, Artificial Sequence
  Synthetic Polynucleotide
ccactgcgta

SEQ ID NO: 2039 - DNA, 10 bp, Artificial Sequence
  Synthetic Polynucleotide
ttgctgtccg

SEQ ID NO: 2040 - DNA, 10 bp, Artificial Sequence
  Synthetic Polynucleotide
cgcacatgtt

SEQ ID NO: 2041 - DNA, 10 bp, Artificial Sequence
  Synthetic Polynucleotide
gcagcggcag

SEQ ID NO: 2042 - DNA, 10 bp, Artificial Sequence
  Synthetic Polynucleotide
tccaatgacg

SEQ ID NO: 2043 - DNA, 10 bp, Artificial Sequence
  Synthetic Polynucleotide
cgagcaagtg

SEQ ID NO: 2044 - DNA, 10 bp, Artificial Sequence
  Synthetic Polynucleotide
ggggtacgtt

SEQ ID NO: 2045 - DNA, 10 bp, Artificial Sequence
  Synthetic Polynucleotide
cacaaaccgt

SEQ ID NO: 2046 - DNA, 10 bp, Artificial Sequence
  Synthetic Polynucleotide
tcgagcacgg

SEQ ID NO: 2047 - DNA, 10 bp, Artificial Sequence
  Synthetic Polynucleotide
taccgtctca

SEQ ID NO: 2048 - DNA, 10 bp, Artificial Sequence
  Synthetic Polynucleotide
gactcggcaa

SEQ ID NO: 2049 - DNA, 10 bp, Artificial Sequence
  Synthetic Polynucleotide
cggacctgac

SEQ ID NO: 2050 - DNA, 10 bp, Artificial Sequence
  Synthetic Polynucleotide
gcggctacgc

SEQ ID NO: 2051 - DNA, 10 bp, Artificial Sequence
  Synthetic Polynucleotide
gacagtacgc

SEQ ID NO: 2052 - DNA, 10 bp, Artificial Sequence
  Synthetic Polynucleotide
cgaagacacg

SEQ ID NO: 2053 - DNA, 10 bp, Artificial Sequence
  Synthetic Polynucleotide
aggagcatgt

SEQ ID NO: 2054 - DNA, 10 bp, Artificial Sequence
  Synthetic Polynucleotide
ttgcaagtgc

SEQ ID NO: 2055 - DNA, 10 bp, Artificial Sequence
  Synthetic Polynucleotide
ttctgcacca

SEQ ID NO: 2056 - DNA, 10 bp, Artificial Sequence
  Synthetic Polynucleotide
ccgtcaacaa

SEQ ID NO: 2057 - DNA, 10 bp, Artificial Sequence
  Synthetic Polynucleotide
tgctggtcac

SEQ ID NO: 2058 - DNA, 10 bp, Artificial Sequence
  Synthetic Polynucleotide
cgctgacgct

SEQ ID NO: 2059 - DNA, 10 bp, Artificial Sequence
  Synthetic Polynucleotide
ggagaagccg

SEQ ID NO: 2060 - DNA, 10 bp, Artificial Sequence
  Synthetic Polynucleotide
ggagcccgca

SEQ ID NO: 2061 - DNA, 10 bp, Artificial Sequence
  Synthetic Polynucleotide
tcgttgctgt

SEQ ID NO: 2062 - DNA, 10 bp, Artificial Sequence
  Synthetic Polynucleotide
gtcgtgatga

SEQ ID NO: 2063 - DNA, 10 bp, Artificial Sequence
  Synthetic Polynucleotide
gttgggaacc

SEQ ID NO: 2064 - DNA, 10 bp, Artificial Sequence
  Synthetic Polynucleotide
agccctgcat

SEQ ID NO: 2065 - DNA, 10 bp, Artificial Sequence
  Synthetic Polynucleotide
atgtgagcca

SEQ ID NO: 2066 - DNA, 10 bp, Artificial Sequence
  Synthetic Polynucleotide
tctgagccca

SEQ ID NO: 2067 - DNA, 10 bp, Artificial Sequence
  Synthetic Polynucleotide
ttcgttgcta

SEQ ID NO: 2068 - DNA, 10 bp, Artificial Sequence
  Synthetic Polynucleotide
ttgtcccagg

SEQ ID NO: 2069 - DNA, 10 bp, Artificial Sequence
  Synthetic Polynucleotide
tggcgagtgt

SEQ ID NO: 2070 - DNA, 10 bp, Artificial Sequence
  Synthetic Polynucleotide
accagccact

SEQ ID NO: 2071 - DNA, 10 bp, Artificial Sequence
  Synthetic Polynucleotide
acgtgaggtg

SEQ ID NO: 2072 - DNA, 10 bp, Artificial Sequence
  Synthetic Polynucleotide
tcctcgtcct

SEQ ID NO: 2073 - DNA, 10 bp, Artificial Sequence
  Synthetic Polynucleotide
ttcgtgatgc

SEQ ID NO: 2074 - DNA, 10 bp, Artificial Sequence
  Synthetic Polynucleotide
tcccgtggag

SEQ ID NO: 2075 - DNA, 10 bp, Artificial Sequence
  Synthetic Polynucleotide
gaagccatga

SEQ ID NO: 2076 - DNA, 10 bp, Artificial Sequence
  Synthetic Polynucleotide
gtgtaacgcg

SEQ ID NO: 2077 - DNA, 10 bp, Artificial Sequence
  Synthetic Polynucleotide
cagccacatc

SEQ ID NO: 2078 - DNA, 10 bp, Artificial Sequence
  Synthetic Polynucleotide
gcacccgatg

SEQ ID NO: 2079 - DNA, 10 bp, Artificial Sequence
  Synthetic Polynucleotide
ccgagacacg

SEQ ID NO: 2080 - DNA, 10 bp, Artificial Sequence
  Synthetic Polynucleotide
ccatcagcgt

SEQ ID NO: 2081 - DNA, 10 bp, Artificial Sequence
  Synthetic Polynucleotide
ctgcggtgtg

SEQ ID NO: 2082 - DNA, 10 bp, Artificial Sequence
  Synthetic Polynucleotide
gggagcaata

SEQ ID NO: 2083 - DNA, 10 bp, Artificial Sequence
  Synthetic Polynucleotide
tccgtccctg

SEQ ID NO: 2084 - DNA, 10 bp, Artificial Sequence
  Synthetic Polynucleotide
tcgatgcgaa

SEQ ID NO: 2085 - DNA, 10 bp, Artificial Sequence
  Synthetic Polynucleotide
cgctagttcc

SEQ ID NO: 2086 - DNA, 10 bp, Artificial Sequence
  Synthetic Polynucleotide
cgaccctcac

SEQ ID NO: 2087 - DNA, 10 bp, Artificial Sequence
  Synthetic Polynucleotide
cgccgaacat

SEQ ID NO: 2088 - DNA, 10 bp, Artificial Sequence
  Synthetic Polynucleotide
ttggtgaacg

SEQ ID NO: 2089 - DNA, 10 bp, Artificial Sequence
  Synthetic Polynucleotide
agtttgtcgc

SEQ ID NO: 2090 - DNA, 10 bp, Artificial Sequence
  Synthetic Polynucleotide
acacttgggc

SEQ ID NO: 2091 - DNA, 10 bp, Artificial Sequence
  Synthetic Polynucleotide
atcgccttga

SEQ ID NO: 2092 - DNA, 10 bp, Artificial Sequence
  Synthetic Polynucleotide
gcgtccgttt

SEQ ID NO: 2093 - DNA, 10 bp, Artificial Sequence
  Synthetic Polynucleotide
actttccggt

SEQ ID NO: 2094 - DNA, 10 bp, Artificial Sequence
  Synthetic Polynucleotide
tgtaagccgt

SEQ ID NO: 2095 - DNA, 10 bp, Artificial Sequence
  Synthetic Polynucleotide
gatgccagtg

SEQ ID NO: 2096 - DNA, 10 bp, Artificial Sequence
  Synthetic Polynucleotide
caacgtaccg

SEQ ID NO: 2097 - DNA, 10 bp, Artificial Sequence
  Synthetic Polynucleotide
ggccatcttc

SEQ ID NO: 2098 - DNA, 10 bp, Artificial Sequence
  Synthetic Polynucleotide
ctgctcctca

SEQ ID NO: 2099 - DNA, 10 bp, Artificial Sequence
  Synthetic Polynucleotide
cgctgccctt

SEQ ID NO: 2100 - DNA, 10 bp, Artificial Sequence
  Synthetic Polynucleotide
ctcctgggaa

SEQ ID NO: 2101 - DNA, 10 bp, Artificial Sequence
  Synthetic Polynucleotide
aagcctcccc

SEQ ID NO: 2102 - DNA, 10 bp, Artificial Sequence
  Synthetic Polynucleotide
tgtgggaggc

SEQ ID NO: 2103 - DNA, 10 bp, Artificial Sequence
  Synthetic Polynucleotide
gcccatcctg

SEQ ID NO: 2104 - DNA, 10 bp, Artificial Sequence
  Synthetic Polynucleotide
atgagctgca

SEQ ID NO: 2105 - DNA, 10 bp, Artificial Sequence
  Synthetic Polynucleotide
gtaggacccc

SEQ ID NO: 2106 - DNA, 10 bp, Artificial Sequence
  Synthetic Polynucleotide
tgctggagag

SEQ ID NO: 2107 - DNA, 10 bp, Artificial Sequence
  Synthetic Polynucleotide
ctgcttcacc

SEQ ID NO: 2108 - DNA, 10 bp, Artificial Sequence
  Synthetic Polynucleotide
gaccactcct

SEQ ID NO: 2109 - DNA, 10 bp, Artificial Sequence
  Synthetic Polynucleotide
actgctctgt

SEQ ID NO: 2110 - DNA, 10 bp, Artificial Sequence
  Synthetic Polynucleotide
ggcacttgcc

SEQ ID NO: 2111 - DNA, 10 bp, Artificial Sequence
  Synthetic Polynucleotide
gtgacacctg

SEQ ID NO: 2112 - DNA, 10 bp, Artificial Sequence
  Synthetic Polynucleotide
ggccttgcaa

SEQ ID NO: 2113 - DNA, 10 bp, Artificial Sequence
  Synthetic Polynucleotide
tggacttggc

SEQ ID NO: 2114 - DNA, 10 bp, Artificial Sequence
  Synthetic Polynucleotide
tattgctgga

SEQ ID NO: 2115 - DNA, 10 bp, Artificial Sequence
  Synthetic Polynucleotide
accaaacgct

SEQ ID NO: 2116 - DNA, 10 bp, Artificial Sequence
  Synthetic Polynucleotide
caggaaagcc

SEQ ID NO: 2117 - DNA, 10 bp, Artificial Sequence
  Synthetic Polynucleotide
tatcgtggca

SEQ ID NO: 2118 - DNA, 10 bp, Artificial Sequence
  Synthetic Polynucleotide
ggtgcattga

SEQ ID NO: 2119 - DNA, 10 bp, Artificial Sequence
  Synthetic Polynucleotide
cccaaccacc

SEQ ID NO: 2120 - DNA, 10 bp, Artificial Sequence
  Synthetic Polynucleotide
tgaaagcagc

SEQ ID NO: 2121 - DNA, 10 bp, Artificial Sequence
  Synthetic Polynucleotide
ccaactgtcc

SEQ ID NO: 2122 - DNA, 10 bp, Artificial Sequence
  Synthetic Polynucleotide
acagcagcac

SEQ ID NO: 2123 - DNA, 10 bp, Artificial Sequence
  Synthetic Polynucleotide
ctctccgtgt

SEQ ID NO: 2124 - DNA, 10 bp, Artificial Sequence
  Synthetic Polynucleotide
tggtttggtg

SEQ ID NO: 2125 - DNA, 10 bp, Artificial Sequence
  Synthetic Polynucleotide
tgttgcgatt

SEQ ID NO: 2126 - DNA, 10 bp, Artificial Sequence
  Synthetic Polynucleotide
cagtgtgcct

SEQ ID NO: 2127 - DNA, 10 bp, Artificial Sequence
  Synthetic Polynucleotide
tacatgccta

SEQ ID NO: 2128 - DNA, 10 bp, Artificial Sequence
  Synthetic Polynucleotide
tgcgtgttct

SEQ ID NO: 2129 - DNA, 10 bp, Artificial Sequence
  Synthetic Polynucleotide
gcgtgtgatt

SEQ ID NO: 2130 - DNA, 10 bp, Artificial Sequence
  Synthetic Polynucleotide
atgcttcagc

SEQ ID NO: 2131 - DNA, 10 bp, Artificial Sequence
  Synthetic Polynucleotide
cataccgtgg

SEQ ID NO: 2132 - DNA, 10 bp, Artificial Sequence
  Synthetic Polynucleotide
gtgtgcctct

SEQ ID NO: 2133 - DNA, 10 bp, Artificial Sequence
  Synthetic Polynucleotide
gccagaacag

SEQ ID NO: 2134 - DNA, 10 bp, Artificial Sequence
  Synthetic Polynucleotide
tgtgacgttc

SEQ ID NO: 2135 - DNA, 10 bp, Artificial Sequence
  Synthetic Polynucleotide
tggatggaga

SEQ ID NO: 2136 - DNA, 10 bp, Artificial Sequence
  Synthetic Polynucleotide
gctgtccact

SEQ ID NO: 2137 - DNA, 10 bp, Artificial Sequence
  Synthetic Polynucleotide
tcacagcagc

SEQ ID NO: 2138 - DNA, 10 bp, Artificial Sequence
  Synthetic Polynucleotide
gcagtatgcc

SEQ ID NO: 2139 - DNA, 10 bp, Artificial Sequence
  Synthetic Polynucleotide
atgagctgga

SEQ ID NO: 2140 - DNA, 10 bp, Artificial Sequence
  Synthetic Polynucleotide
tggtactcgt

SEQ ID NO: 2141 - DNA, 10 bp, Artificial Sequence
  Synthetic Polynucleotide
gggttctgga

SEQ ID NO: 2142 - DNA, 10 bp, Artificial Sequence
  Synthetic Polynucleotide
tgagctttcg

SEQ ID NO: 2143 - DNA, 10 bp, Artificial Sequence
  Synthetic Polynucleotide
gtgttggtga

SEQ ID NO: 2144 - DNA, 10 bp, Artificial Sequence
  Synthetic Polynucleotide
cgtcgagact

SEQ ID NO: 2145 - DNA, 10 bp, Artificial Sequence
  Synthetic Polynucleotide
aagcatcagc

SEQ ID NO: 2146 - DNA, 10 bp, Artificial Sequence
  Synthetic Polynucleotide
catttgcagc

SEQ ID NO: 2147 - DNA, 10 bp, Artificial Sequence
  Synthetic Polynucleotide
caacggaagc

SEQ ID NO: 2148 - DNA, 10 bp, Artificial Sequence
  Synthetic Polynucleotide
tcctcttcgt

SEQ ID NO: 2149 - DNA, 10 bp, Artificial Sequence
  Synthetic Polynucleotide
ccccaaggaa

SEQ ID NO: 2150 - DNA, 10 bp, Artificial Sequence
  Synthetic Polynucleotide
tccccaaaac

SEQ ID NO: 2151 - DNA, 10 bp, Artificial Sequence
  Synthetic Polynucleotide
tgtacgtggc

SEQ ID NO: 2152 - DNA, 10 bp, Artificial Sequence
  Synthetic Polynucleotide
tcgatctggg

SEQ ID NO: 2153 - DNA, 10 bp, Artificial Sequence
  Synthetic Polynucleotide
tggtggcaag

SEQ ID NO: 2154 - DNA, 10 bp, Artificial Sequence
  Synthetic Polynucleotide
ggggtgtgcg

SEQ ID NO: 2155 - DNA, 10 bp, Artificial Sequence
  Synthetic Polynucleotide
gaccactggg

SEQ ID NO: 2156 - DNA, 10 bp, Artificial Sequence
  Synthetic Polynucleotide
agcagttgcg

SEQ ID NO: 2157 - DNA, 10 bp, Artificial Sequence
  Synthetic Polynucleotide
attcgtcgtg

SEQ ID NO: 2158 - DNA, 10 bp, Artificial Sequence
  Synthetic Polynucleotide
gcctggatga

SEQ ID NO: 2159 - DNA, 10 bp, Artificial Sequence
  Synthetic Polynucleotide
tattgcctcc

SEQ ID NO: 2160 - DNA, 10 bp, Artificial Sequence
  Synthetic Polynucleotide
actggttcga

SEQ ID NO: 2161 - DNA, 10 bp, Artificial Sequence
  Synthetic Polynucleotide
acggaaggaa

SEQ ID NO: 2162 - DNA, 10 bp, Artificial Sequence
  Synthetic Polynucleotide
tccgctccat

SEQ ID NO: 2163 - DNA, 10 bp, Artificial Sequence
  Synthetic Polynucleotide
atggagcaga

SEQ ID NO: 2164 - DNA, 10 bp, Artificial Sequence
  Synthetic Polynucleotide
tgttggtgtg

SEQ ID NO: 2165 - DNA, 10 bp, Artificial Sequence
  Synthetic Polynucleotide
tcgtctacga

SEQ ID NO: 2166 - DNA, 10 bp, Artificial Sequence
  Synthetic Polynucleotide
ccgtcctcct

SEQ ID NO: 2167 - DNA, 10 bp, Artificial Sequence
  Synthetic Polynucleotide
tgaacgaggt

SEQ ID NO: 2168 - DNA, 10 bp, Artificial Sequence
  Synthetic Polynucleotide
cgcagtcagt

SEQ ID NO: 2169 - DNA, 10 bp, Artificial Sequence
  Synthetic Polynucleotide
tatgcgatgt

SEQ ID NO: 2170 - DNA, 10 bp, Artificial Sequence
  Synthetic Polynucleotide
gacgatggta

SEQ ID NO: 2171 - DNA, 10 bp, Artificial Sequence
  Synthetic Polynucleotide
ttcgggatgt

SEQ ID NO: 2172 - DNA, 10 bp, Artificial Sequence
  Synthetic Polynucleotide
aggttggaca

SEQ ID NO: 2173 - DNA, 10 bp, Artificial Sequence
  Synthetic Polynucleotide
gcaagagcta

SEQ ID NO: 2174 - DNA, 10 bp, Artificial Sequence
  Synthetic Polynucleotide
cgaatgcagc

SEQ ID NO: 2175 - DNA, 10 bp, Artificial Sequence
  Synthetic Polynucleotide
ccgggctgat

SEQ ID NO: 2176 - DNA, 10 bp, Artificial Sequence
  Synthetic Polynucleotide
tgcgaagttg

SEQ ID NO: 2177 - DNA, 10 bp, Artificial Sequence
  Synthetic Polynucleotide
acgattgctg

SEQ ID NO: 2178 - DNA, 10 bp, Artificial Sequence
  Synthetic Polynucleotide
gacctgccaa

SEQ ID NO: 2179 - DNA, 10 bp, Artificial Sequence
  Synthetic Polynucleotide
tgttcatggc

SEQ ID NO: 2180 - DNA, 10 bp, Artificial Sequence
  Synthetic Polynucleotide
ccctcctgcc

SEQ ID NO: 2181 - DNA, 10 bp, Artificial Sequence
  Synthetic Polynucleotide
tcccaacgcg

SEQ ID NO: 2182 - DNA, 10 bp, Artificial Sequence
  Synthetic Polynucleotide
agccacacgc

SEQ ID NO: 2183 - DNA, 10 bp, Artificial Sequence
  Synthetic Polynucleotide
cggaagcggc

SEQ ID NO: 2184 - DNA, 10 bp, Artificial Sequence
  Synthetic Polynucleotide
gaccactgcc

SEQ ID NO: 2185 - DNA, 10 bp, Artificial Sequence
  Synthetic Polynucleotide
gggtcgttcg

SEQ ID NO: 2186 - DNA, 10 bp, Artificial Sequence
  Synthetic Polynucleotide
cttgccacca

SEQ ID NO: 2187 - DNA, 10 bp, Artificial Sequence
  Synthetic Polynucleotide
acagttgctg

SEQ ID NO: 2188 - DNA, 10 bp, Artificial Sequence
  Synthetic Polynucleotide
agccacatct

SEQ ID NO: 2189 - DNA, 10 bp, Artificial Sequence
  Synthetic Polynucleotide
taagacgggt

SEQ ID NO: 2190 - DNA, 10 bp, Artificial Sequence
  Synthetic Polynucleotide
ggtaagcacg

SEQ ID NO: 2191 - DNA, 10 bp, Artificial Sequence
  Synthetic Polynucleotide
cgtgatgtcg

SEQ ID NO: 2192 - DNA, 10 bp, Artificial Sequence
  Synthetic Polynucleotide
tccacaggga

SEQ ID NO: 2193 - DNA, 10 bp, Artificial Sequence
  Synthetic Polynucleotide
tagtgtcgct

SEQ ID NO: 2194 - DNA, 10 bp, Artificial Sequence
  Synthetic Polynucleotide
tgattcgacg

SEQ ID NO: 2195 - DNA, 10 bp, Artificial Sequence
  Synthetic Polynucleotide
ccctgcgtgg

SEQ ID NO: 2196 - DNA, 10 bp, Artificial Sequence
  Synthetic Polynucleotide
gcgataagcg

SEQ ID NO: 2197 - DNA, 10 bp, Artificial Sequence
  Synthetic Polynucleotide
tgatggacgc

SEQ ID NO: 2198 - DNA, 10 bp, Artificial Sequence
  Synthetic Polynucleotide
gcgtataccc

SEQ ID NO: 2199 - DNA, 10 bp, Artificial Sequence
  Synthetic Polynucleotide
tcatggcaga

SEQ ID NO: 2200 - DNA, 10 bp, Artificial Sequence
  Synthetic Polynucleotide
ctccctcacg

SEQ ID NO: 2201 - DNA, 10 bp, Artificial Sequence
  Synthetic Polynucleotide
tggaggaaga

SEQ ID NO: 2202 - DNA, 10 bp, Artificial Sequence
  Synthetic Polynucleotide
cacattcgcc

SEQ ID NO: 2203 - DNA, 10 bp, Artificial Sequence
  Synthetic Polynucleotide
cgaaacgtgc

SEQ ID NO: 2204 - DNA, 10 bp, Artificial Sequence
  Synthetic Polynucleotide
gtgcggttgg

SEQ ID NO: 2205 - DNA, 10 bp, Artificial Sequence
  Synthetic Polynucleotide
cgcaagaggt

SEQ ID NO: 2206 - DNA, 10 bp, Artificial Sequence
  Synthetic Polynucleotide
tctcccactc

SEQ ID NO: 2207 - DNA, 10 bp, Artificial Sequence
  Synthetic Polynucleotide
ggatggtggc

SEQ ID NO: 2208 - DNA, 10 bp, Artificial Sequence
  Synthetic Polynucleotide
gctgtgctga

SEQ ID NO: 2209 - DNA, 10 bp, Artificial Sequence
  Synthetic Polynucleotide
tggaggtgtg

SEQ ID NO: 2210 - DNA, 10 bp, Artificial Sequence
  Synthetic Polynucleotide
gaagttggca

SEQ ID NO: 2211 - DNA, 10 bp, Artificial Sequence
  Synthetic Polynucleotide
tgaagcgtgg

SEQ ID NO: 2212 - DNA, 10 bp, Artificial Sequence
  Synthetic Polynucleotide
tcatgcccat

SEQ ID NO: 2213 - DNA, 10 bp, Artificial Sequence
  Synthetic Polynucleotide
taagcggtga

SEQ ID NO: 2214 - DNA, 10 bp, Artificial Sequence
  Synthetic Polynucleotide
gcacgttcag

SEQ ID NO: 2215 - DNA, 10 bp, Artificial Sequence
  Synthetic Polynucleotide
ctgttgctga

SEQ ID NO: 2216 - DNA, 10 bp, Artificial Sequence
  Synthetic Polynucleotide
aacgcctctt

SEQ ID NO: 2217 - DNA, 10 bp, Artificial Sequence
  Synthetic Polynucleotide
tgcatgacag

SEQ ID NO: 2218 - DNA, 10 bp, Artificial Sequence
  Synthetic Polynucleotide
ggtctcaagc

SEQ ID NO: 2219 - DNA, 10 bp, Artificial Sequence
  Synthetic Polynucleotide
ctcaacgcct

SEQ ID NO: 2220 - DNA, 10 bp, Artificial Sequence
  Synthetic Polynucleotide
tcaccgcctc

SEQ ID NO: 2221 - DNA, 10 bp, Artificial Sequence
  Synthetic Polynucleotide
agcgatttgg

SEQ ID NO: 2222 - DNA, 10 bp, Artificial Sequence
  Synthetic Polynucleotide
tgcatagcgt

SEQ ID NO: 2223 - DNA, 10 bp, Artificial Sequence
  Synthetic Polynucleotide
gtgggttgga

SEQ ID NO: 2224 - DNA, 10 bp, Artificial Sequence
  Synthetic Polynucleotide
acgagtcctc

SEQ ID NO: 2225 - DNA, 10 bp, Artificial Sequence
  Synthetic Polynucleotide
tggaggacag

SEQ ID NO: 2226 - DNA, 10 bp, Artificial Sequence
  Synthetic Polynucleotide
cgctaactga

SEQ ID NO: 2227 - DNA, 10 bp, Artificial Sequence
  Synthetic Polynucleotide
ggtgttagcc

SEQ ID NO: 2228 - DNA, 10 bp, Artificial Sequence
  Synthetic Polynucleotide
acggttggag

SEQ ID NO: 2229 - DNA, 10 bp, Artificial Sequence
  Synthetic Polynucleotide
cgttcggctg

SEQ ID NO: 2230 - DNA, 10 bp, Artificial Sequence
  Synthetic Polynucleotide
ggtgtcagtg

SEQ ID NO: 2231 - DNA, 10 bp, Artificial Sequence
  Synthetic Polynucleotide
ttcgtgatgc

SEQ ID NO: 2232 - DNA, 10 bp, Artificial Sequence
  Synthetic Polynucleotide
attgccaccg

SEQ ID NO: 2233 - DNA, 10 bp, Artificial Sequence
  Synthetic Polynucleotide
tgctgaagga

SEQ ID NO: 2234 - DNA, 10 bp, Artificial Sequence
  Synthetic Polynucleotide
acgtcggaaa

SEQ ID NO: 2235 - DNA, 10 bp, Artificial Sequence
  Synthetic Polynucleotide
tcaacgctac

SEQ ID NO: 2236 - DNA, 10 bp, Artificial Sequence
  Synthetic Polynucleotide
acgtcttgca

SEQ ID NO: 2237 - DNA, 10 bp, Artificial Sequence
  Synthetic Polynucleotide
cagtccgagt

SEQ ID NO: 2238 - DNA, 10 bp, Artificial Sequence
  Synthetic Polynucleotide
tcctggggaa

SEQ ID NO: 2239 - DNA, 10 bp, Artificial Sequence
  Synthetic Polynucleotide
tcgatgaggc

SEQ ID NO: 2240 - DNA, 10 bp, Artificial Sequence
  Synthetic Polynucleotide
cggtccagaa

SEQ ID NO: 2241 - DNA, 10 bp, Artificial Sequence
  Synthetic Polynucleotide
tgtttgggct

SEQ ID NO: 2242 - DNA, 10 bp, Artificial Sequence
  Synthetic Polynucleotide
tcctcctgta

SEQ ID NO: 2243 - DNA, 10 bp, Artificial Sequence
  Synthetic Polynucleotide
gtttggtgcg

SEQ ID NO: 2244 - DNA, 10 bp, Artificial Sequence
  Synthetic Polynucleotide
acaggcatca

SEQ ID NO: 2245 - DNA, 10 bp, Artificial Sequence
  Synthetic Polynucleotide
atggagctga

SEQ ID NO: 2246 - DNA, 10 bp, Artificial Sequence
  Synthetic Polynucleotide
tgccgtaagc

SEQ ID NO: 2247 - DNA, 10 bp, Artificial Sequence
  Synthetic Polynucleotide
tcgaggatga

SEQ ID NO: 2248 - DNA, 10 bp, Artificial Sequence
  Synthetic Polynucleotide
cgtcacgagt

SEQ ID NO: 2249 - DNA, 10 bp, Artificial Sequence
  Synthetic Polynucleotide
tggtgactca

SEQ ID NO: 2250 - DNA, 10 bp, Artificial Sequence
  Synthetic Polynucleotide
ctacgcagcc

SEQ ID NO: 2251 - DNA, 10 bp, Artificial Sequence
  Synthetic Polynucleotide
cccactttgg

SEQ ID NO: 2252 - DNA, 10 bp, Artificial Sequence
  Synthetic Polynucleotide
tgatcctgca

SEQ ID NO: 2253 - DNA, 10 bp, Artificial Sequence
  Synthetic Polynucleotide
ctttggtcga

SEQ ID NO: 2254 - DNA, 10 bp, Artificial Sequence
  Synthetic Polynucleotide
tgatttccgc

SEQ ID NO: 2255 - DNA, 10 bp, Artificial Sequence
  Synthetic Polynucleotide
gaacgatggg

SEQ ID NO: 2256 - DNA, 10 bp, Artificial Sequence
  Synthetic Polynucleotide
cgtccattcc

SEQ ID NO: 2257 - DNA, 10 bp, Artificial Sequence
  Synthetic Polynucleotide
tgaaggtgga

SEQ ID NO: 2258 - DNA, 10 bp, Artificial Sequence
  Synthetic Polynucleotide
gtgaaaggcg

SEQ ID NO: 2259 - DNA, 10 bp, Artificial Sequence
  Synthetic Polynucleotide
atgagggcat

SEQ ID NO: 2260 - DNA, 10 bp, Artificial Sequence
  Synthetic Polynucleotide
gtgcgaggaa

SEQ ID NO: 2261 - DNA, 10 bp, Artificial Sequence
  Synthetic Polynucleotide
gcattgacgg

SEQ ID NO: 2262 - DNA, 10 bp, Artificial Sequence
  Synthetic Polynucleotide
agagcgtaca

SEQ ID NO: 2263 - DNA, 10 bp, Artificial Sequence
  Synthetic Polynucleotide
acagcgagaa

SEQ ID NO: 2264 - DNA, 10 bp, Artificial Sequence
  Synthetic Polynucleotide
ggattggggc

SEQ ID NO: 2265 - DNA, 10 bp, Artificial Sequence
  Synthetic Polynucleotide
gctgttgaca

SEQ ID NO: 2266 - DNA, 10 bp, Artificial Sequence
  Synthetic Polynucleotide
tccattctgc

SEQ ID NO: 2267 - DNA, 10 bp, Artificial Sequence
  Synthetic Polynucleotide
ggaccaggta

SEQ ID NO: 2268 - DNA, 10 bp, Artificial Sequence
  Synthetic Polynucleotide
actgtggccc

SEQ ID NO: 2269 - DNA, 10 bp, Artificial Sequence
  Synthetic Polynucleotide
ctcgagcact

SEQ ID NO: 2270 - DNA, 10 bp, Artificial Sequence
  Synthetic Polynucleotide
agtgccaaca

SEQ ID NO: 2271 - DNA, 10 bp, Artificial Sequence
  Synthetic Polynucleotide
agttcgggaa

SEQ ID NO: 2272 - DNA, 10 bp, Artificial Sequence
  Synthetic Polynucleotide
gcctgaagcg

SEQ ID NO: 2273 - DNA, 10 bp, Artificial Sequence
  Synthetic Polynucleotide
tgcatttcgg

SEQ ID NO: 2274 - DNA, 10 bp, Artificial Sequence
  Synthetic Polynucleotide
tgtggtgagt

SEQ ID NO: 2275 - DNA, 10 bp, Artificial Sequence
  Synthetic Polynucleotide
tatggaaggc

SEQ ID NO: 2276 - DNA, 10 bp, Artificial Sequence
  Synthetic Polynucleotide
tcaccttgca

SEQ ID NO: 2277 - DNA, 10 bp, Artificial Sequence
  Synthetic Polynucleotide
agacccagct

SEQ ID NO: 2278 - DNA, 10 bp, Artificial Sequence
  Synthetic Polynucleotide
ctctgtgctc

SEQ ID NO: 2279 - DNA, 10 bp, Artificial Sequence
  Synthetic Polynucleotide
ttgggagtga

SEQ ID NO: 2280 - DNA, 10 bp, Artificial Sequence
  Synthetic Polynucleotide
caacttcgcc

SEQ ID NO: 2281 - DNA, 10 bp, Artificial Sequence
  Synthetic Polynucleotide
cgtccggctt

SEQ ID NO: 2282 - DNA, 10 bp, Artificial Sequence
  Synthetic Polynucleotide
ccaagatgcg

SEQ ID NO: 2283 - DNA, 10 bp, Artificial Sequence
  Synthetic Polynucleotide
gttggaacgt

SEQ ID NO: 2284 - DNA, 10 bp, Artificial Sequence
  Synthetic Polynucleotide
cccttacccc

SEQ ID NO: 2285 - DNA, 10 bp, Artificial Sequence
  Synthetic Polynucleotide
gcggaatggg

SEQ ID NO: 2286 - DNA, 10 bp, Artificial Sequence
  Synthetic Polynucleotide
tcttgctcca

SEQ ID NO: 2287 - DNA, 10 bp, Artificial Sequence
  Synthetic Polynucleotide
gagtttgcca

SEQ ID NO: 2288 - DNA, 10 bp, Artificial Sequence
  Synthetic Polynucleotide
tctttgctcc

SEQ ID NO: 2289 - DNA, 10 bp, Artificial Sequence
  Synthetic Polynucleotide
acgatgcgag

SEQ ID NO: 2290 - DNA, 10 bp, Artificial Sequence
  Synthetic Polynucleotide
gcggtctgag

SEQ ID NO: 2291 - DNA, 10 bp, Artificial Sequence
  Synthetic Polynucleotide
gtgtcgaacc

SEQ ID NO: 2292 - DNA, 10 bp, Artificial Sequence
  Synthetic Polynucleotide
tgaagctcct

SEQ ID NO: 2293 - DNA, 10 bp, Artificial Sequence
  Synthetic Polynucleotide
gaagcgtggt

SEQ ID NO: 2294 - DNA, 10 bp, Artificial Sequence
  Synthetic Polynucleotide
tcggaacacc

SEQ ID NO: 2295 - DNA, 10 bp, Artificial Sequence
  Synthetic Polynucleotide
aatcgtcgtg

SEQ ID NO: 2296 - DNA, 10 bp, Artificial Sequence
  Synthetic Polynucleotide
tagcaacgtt

SEQ ID NO: 2297 - DNA, 10 bp, Artificial Sequence
  Synthetic Polynucleotide
cttccactcg

SEQ ID NO: 2298 - DNA, 10 bp, Artificial Sequence
  Synthetic Polynucleotide
gtcttcgcca

SEQ ID NO: 2299 - DNA, 10 bp, Artificial Sequence
  Synthetic Polynucleotide
agcgaaggtt

SEQ ID NO: 2300 - DNA, 10 bp, Artificial Sequence
  Synthetic Polynucleotide
gcgttcagaa

SEQ ID NO: 2301 - DNA, 10 bp, Artificial Sequence
  Synthetic Polynucleotide
cgcttgacgc

SEQ ID NO: 2302 - DNA, 10 bp, Artificial Sequence
  Synthetic Polynucleotide
acactgcctg

SEQ ID NO: 2303 - DNA, 10 bp, Artificial Sequence
  Synthetic Polynucleotide
cgatccgtct

SEQ ID NO: 2304 - DNA, 10 bp, Artificial Sequence
  Synthetic Polynucleotide
gagttggccc

SEQ ID NO: 2305 - DNA, 10 bp, Artificial Sequence
  Synthetic Polynucleotide
tcgtggatct

SEQ ID NO: 2306 - DNA, 10 bp, Artificial Sequence
  Synthetic Polynucleotide
cacacaggac

SEQ ID NO: 2307 - DNA, 10 bp, Artificial Sequence
  Synthetic Polynucleotide
tgaagccagg

SEQ ID NO: 2308 - DNA, 10 bp, Artificial Sequence
  Synthetic Polynucleotide
aggcacaaga

SEQ ID NO: 2309 - DNA, 10 bp, Artificial Sequence
  Synthetic Polynucleotide
agagctgacg

SEQ ID NO: 2310 - DNA, 10 bp, Artificial Sequence
  Synthetic Polynucleotide
tcgcacccaa

SEQ ID NO: 2311 - DNA, 10 bp, Artificial Sequence
  Synthetic Polynucleotide
accagatgca

SEQ ID NO: 2312 - DNA, 10 bp, Artificial Sequence
  Synthetic Polynucleotide
tagcgatggc

SEQ ID NO: 2313 - DNA, 10 bp, Artificial Sequence
  Synthetic Polynucleotide
agacgccaat

SEQ ID NO: 2314 - DNA, 10 bp, Artificial Sequence
  Synthetic Polynucleotide
taagcactga

SEQ ID NO: 2315 - DNA, 10 bp, Artificial Sequence
  Synthetic Polynucleotide
acggtgatgc

SEQ ID NO: 2316 - DNA, 10 bp, Artificial Sequence
  Synthetic Polynucleotide
tgggaacgtt

SEQ ID NO: 2317 - DNA, 10 bp, Artificial Sequence
  Synthetic Polynucleotide
tgggcatccg

SEQ ID NO: 2318 - DNA, 10 bp, Artificial Sequence
  Synthetic Polynucleotide
cggttggagt

SEQ ID NO: 2319 - DNA, 10 bp, Artificial Sequence
  Synthetic Polynucleotide
cagaacgcat

SEQ ID NO: 2320 - DNA, 10 bp, Artificial Sequence
  Synthetic Polynucleotide
agctgaccaa

SEQ ID NO: 2321 - DNA, 10 bp, Artificial Sequence
  Synthetic Polynucleotide
tctagcagca

SEQ ID NO: 2322 - DNA, 10 bp, Artificial Sequence
  Synthetic Polynucleotide
tcaacagcca

SEQ ID NO: 2323 - DNA, 10 bp, Artificial Sequence
  Synthetic Polynucleotide
acgcctgata

SEQ ID NO: 2324 - DNA, 10 bp, Artificial Sequence
  Synthetic Polynucleotide
tgccacgctc

SEQ ID NO: 2325 - DNA, 10 bp, Artificial Sequence
  Synthetic Polynucleotide
tgctacgcaa

SEQ ID NO: 2326 - DNA, 10 bp, Artificial Sequence
  Synthetic Polynucleotide
gctgtgaaca

SEQ ID NO: 2327 - DNA, 10 bp, Artificial Sequence
  Synthetic Polynucleotide
tacaccccaa

SEQ ID NO: 2328 - DNA, 10 bp, Artificial Sequence
  Synthetic Polynucleotide
cggacggtac

SEQ ID NO: 2329 - DNA, 10 bp, Artificial Sequence
  Synthetic Polynucleotide
tggaaacgtg

SEQ ID NO: 2330 - DNA, 10 bp, Artificial Sequence
  Synthetic Polynucleotide
gccatacgta

SEQ ID NO: 2331 - DNA, 10 bp, Artificial Sequence
  Synthetic Polynucleotide
tatggacgtg

SEQ ID NO: 2332 - DNA, 10 bp, Artificial Sequence
  Synthetic Polynucleotide
tgagcattgc

SEQ ID NO: 2333 - DNA, 10 bp, Artificial Sequence
  Synthetic Polynucleotide
ccggctcttg

SEQ ID NO: 2334 - DNA, 10 bp, Artificial Sequence
  Synthetic Polynucleotide
tgcgtcctca

SEQ ID NO: 2335 - DNA, 10 bp, Artificial Sequence
  Synthetic Polynucleotide
ttggacgcac

SEQ ID NO: 2336 - DNA, 10 bp, Artificial Sequence
  Synthetic Polynucleotide
acgtgtcatg

SEQ ID NO: 2337 - DNA, 10 bp, Artificial Sequence
  Synthetic Polynucleotide
agtttgccca

SEQ ID NO: 2338 - DNA, 10 bp, Artificial Sequence
  Synthetic Polynucleotide
cacttgctga

SEQ ID NO: 2339 - DNA, 10 bp, Artificial Sequence
  Synthetic Polynucleotide
ttgaatgcgc

SEQ ID NO: 2340 - DNA, 10 bp, Artificial Sequence
  Synthetic Polynucleotide
tcacatccca

SEQ ID NO: 2341 - DNA, 10 bp, Artificial Sequence
  Synthetic Polynucleotide
atcgctccgg

SEQ ID NO: 2342 - DNA, 10 bp, Artificial Sequence
  Synthetic Polynucleotide
tcgcacccat

SEQ ID NO: 2343 - DNA, 10 bp, Artificial Sequence
  Synthetic Polynucleotide
cgatccgagg

SEQ ID NO: 2344 - DNA, 10 bp, Artificial Sequence
  Synthetic Polynucleotide
cacacctgcc

SEQ ID NO: 2345 - DNA, 10 bp, Artificial Sequence
  Synthetic Polynucleotide
gaccaactgg

SEQ ID NO: 2346 - DNA, 10 bp, Artificial Sequence
  Synthetic Polynucleotide
gctcatcccc

SEQ ID NO: 2347 - DNA, 10 bp, Artificial Sequence
  Synthetic Polynucleotide
tcgctcaaag

SEQ ID NO: 2348 - DNA, 10 bp, Artificial Sequence
  Synthetic Polynucleotide
gcaccttgag

SEQ ID NO: 2349 - DNA, 10 bp, Artificial Sequence
  Synthetic Polynucleotide
gcggcattga

SEQ ID NO: 2350 - DNA, 10 bp, Artificial Sequence
  Synthetic Polynucleotide
aagccaccag

SEQ ID NO: 2351 - DNA, 10 bp, Artificial Sequence
  Synthetic Polynucleotide
aatcgaccca

SEQ ID NO: 2352 - DNA, 10 bp, Artificial Sequence
  Synthetic Polynucleotide
tgcaccattg

SEQ ID NO: 2353 - DNA, 10 bp, Artificial Sequence
  Synthetic Polynucleotide
tgatcccgag

SEQ ID NO: 2354 - DNA, 10 bp, Artificial Sequence
  Synthetic Polynucleotide
cacttgtgct

SEQ ID NO: 2355 - DNA, 10 bp, Artificial Sequence
  Synthetic Polynucleotide
gcaccagtcg

SEQ ID NO: 2356 - DNA, 10 bp, Artificial Sequence
  Synthetic Polynucleotide
taagggcaga

SEQ ID NO: 2357 - DNA, 10 bp, Artificial Sequence
  Synthetic Polynucleotide
ttgtcatggc

SEQ ID NO: 2358 - DNA, 10 bp, Artificial Sequence
  Synthetic Polynucleotide
gaacgatgcc

SEQ ID NO: 2359 - DNA, 10 bp, Artificial Sequence
  Synthetic Polynucleotide
tgacgcattg

SEQ ID NO: 2360 - DNA, 10 bp, Artificial Sequence
  Synthetic Polynucleotide
gcatcaacga

SEQ ID NO: 2361 - DNA, 10 bp, Artificial Sequence
  Synthetic Polynucleotide
tggcgaatga

SEQ ID NO: 2362 - DNA, 10 bp, Artificial Sequence
  Synthetic Polynucleotide
gagacgcagt

SEQ ID NO: 2363 - DNA, 10 bp, Artificial Sequence
  Synthetic Polynucleotide
gcatatcggc

SEQ ID NO: 2364 - DNA, 10 bp, Artificial Sequence
  Synthetic Polynucleotide
tcaacaacga

SEQ ID NO: 2365 - DNA, 10 bp, Artificial Sequence
  Synthetic Polynucleotide
tgttcccgtt

SEQ ID NO: 2366 - DNA, 10 bp, Artificial Sequence
  Synthetic Polynucleotide
tggatcgtca

SEQ ID NO: 2367 - DNA, 10 bp, Artificial Sequence
  Synthetic Polynucleotide
gcgaaagaga

SEQ ID NO: 2368 - DNA, 10 bp, Artificial Sequence
  Synthetic Polynucleotide
caatcgtgca

SEQ ID NO: 2369 - DNA, 10 bp, Artificial Sequence
  Synthetic Polynucleotide
agaccaccac

SEQ ID NO: 2370 - DNA, 10 bp, Artificial Sequence
  Synthetic Polynucleotide
cggatatcgc

SEQ ID NO: 2371 - DNA, 10 bp, Artificial Sequence
  Synthetic Polynucleotide
agaggcttca

SEQ ID NO: 2372 - DNA, 10 bp, Artificial Sequence
  Synthetic Polynucleotide
cattccgggt

SEQ ID NO: 2373 - DNA, 10 bp, Artificial Sequence
  Synthetic Polynucleotide
tgaacgagca

SEQ ID NO: 2374 - DNA, 10 bp, Artificial Sequence
  Synthetic Polynucleotide
tgctgctgaa

SEQ ID NO: 2375 - DNA, 10 bp, Artificial Sequence
  Synthetic Polynucleotide
gttgacggtg

SEQ ID NO: 2376 - DNA, 10 bp, Artificial Sequence
  Synthetic Polynucleotide
tcacgtttca

SEQ ID NO: 2377 - DNA, 10 bp, Artificial Sequence
  Synthetic Polynucleotide
tggcggtaaa

SEQ ID NO: 2378 - DNA, 10 bp, Artificial Sequence
  Synthetic Polynucleotide
ccctccgata

SEQ ID NO: 2379 - DNA, 10 bp, Artificial Sequence
  Synthetic Polynucleotide
tttcgttgca

SEQ ID NO: 2380 - DNA, 10 bp, Artificial Sequence
  Synthetic Polynucleotide
tgctctggac

SEQ ID NO: 2381 - DNA, 10 bp, Artificial Sequence
  Synthetic Polynucleotide
aatgttgccg

SEQ ID NO: 2382 - DNA, 10 bp, Artificial Sequence
  Synthetic Polynucleotide
gctcttgcgt

SEQ ID NO: 2383 - DNA, 10 bp, Artificial Sequence
  Synthetic Polynucleotide
ctcctccgtt

SEQ ID NO: 2384 - DNA, 10 bp, Artificial Sequence
  Synthetic Polynucleotide
cacgttgtca

SEQ ID NO: 2385 - DNA, 10 bp, Artificial Sequence
  Synthetic Polynucleotide
acgagtttgc

SEQ ID NO: 2386 - DNA, 10 bp, Artificial Sequence
  Synthetic Polynucleotide
cacgagtcac

SEQ ID NO: 2387 - DNA, 10 bp, Artificial Sequence
  Synthetic Polynucleotide
caaaggctga

SEQ ID NO: 2388 - DNA, 10 bp, Artificial Sequence
  Synthetic Polynucleotide
tccaaagcag

SEQ ID NO: 2389 - DNA, 10 bp, Artificial Sequence
  Synthetic Polynucleotide
gctagcgaga

SEQ ID NO: 2390 - DNA, 10 bp, Artificial Sequence
  Synthetic Polynucleotide
gagcggttgg

SEQ ID NO: 2391 - DNA, 10 bp, Artificial Sequence
  Synthetic Polynucleotide
ggaggtgcgt

SEQ ID NO: 2392 - DNA, 10 bp, Artificial Sequence
  Synthetic Polynucleotide
tggcgattct

SEQ ID NO: 2393 - DNA, 10 bp, Artificial Sequence
  Synthetic Polynucleotide
ggtccgttac

SEQ ID NO: 2394 - DNA, 10 bp, Artificial Sequence
  Synthetic Polynucleotide
ggcggacatc

SEQ ID NO: 2395 - DNA, 10 bp, Artificial Sequence
  Synthetic Polynucleotide
tgttggctta

SEQ ID NO: 2396 - DNA, 10 bp, Artificial Sequence
  Synthetic Polynucleotide
agccgaaagg

SEQ ID NO: 2397 - DNA, 10 bp, Artificial Sequence
  Synthetic Polynucleotide
agtggagtcc

SEQ ID NO: 2398 - DNA, 10 bp, Artificial Sequence
  Synthetic Polynucleotide
cagggaacac

SEQ ID NO: 2399 - DNA, 10 bp, Artificial Sequence
  Synthetic Polynucleotide
gttgatgcca

SEQ ID NO: 2400 - DNA, 10 bp, Artificial Sequence
  Synthetic Polynucleotide
tcccactcat

SEQ ID NO: 2401 - DNA, 10 bp, Artificial Sequence
  Synthetic Polynucleotide
acccttcgtc

SEQ ID NO: 2402 - DNA, 10 bp, Artificial Sequence
  Synthetic Polynucleotide
tcattccgtc

SEQ ID NO: 2403 - DNA, 10 bp, Artificial Sequence
  Synthetic Polynucleotide
agaacgatgc

SEQ ID NO: 2404 - DNA, 10 bp, Artificial Sequence
  Synthetic Polynucleotide
gttgcccatc

SEQ ID NO: 2405 - DNA, 10 bp, Artificial Sequence
  Synthetic Polynucleotide
cggagatgga

SEQ ID NO: 2406 - DNA, 10 bp, Artificial Sequence
  Synthetic Polynucleotide
acaaccgaac

SEQ ID NO: 2407 - DNA, 10 bp, Artificial Sequence
  Synthetic Polynucleotide
ccgtaccgta

SEQ ID NO: 2408 - DNA, 10 bp, Artificial Sequence
  Synthetic Polynucleotide
tggctcctga

SEQ ID NO: 2409 - DNA, 10 bp, Artificial Sequence
  Synthetic Polynucleotide
gatgcaggta

SEQ ID NO: 2410 - DNA, 10 bp, Artificial Sequence
  Synthetic Polynucleotide
tgcgtaccct

SEQ ID NO: 2411 - DNA, 10 bp, Artificial Sequence
  Synthetic Polynucleotide
gcttctcgtg

SEQ ID NO: 2412 - DNA, 10 bp, Artificial Sequence
  Synthetic Polynucleotide
agacacccag

SEQ ID NO: 2413 - DNA, 10 bp, Artificial Sequence
  Synthetic Polynucleotide
aagcagaagc

SEQ ID NO: 2414 - DNA, 10 bp, Artificial Sequence
  Synthetic Polynucleotide
tcttcctgca

SEQ ID NO: 2415 - DNA, 10 bp, Artificial Sequence
  Synthetic Polynucleotide
gcggaacgtt

SEQ ID NO: 2416 - DNA, 10 bp, Artificial Sequence
  Synthetic Polynucleotide
tggatagcca

SEQ ID NO: 2417 - DNA, 10 bp, Artificial Sequence
  Synthetic Polynucleotide
ggatatgcgc

SEQ ID NO: 2418 - DNA, 10 bp, Artificial Sequence
  Synthetic Polynucleotide
taggcgtttt

SEQ ID NO: 2419 - DNA, 10 bp, Artificial Sequence
  Synthetic Polynucleotide
tacaggcaca

SEQ ID NO: 2420 - DNA, 10 bp, Artificial Sequence
  Synthetic Polynucleotide
cctcactcca

SEQ ID NO: 2421 - DNA, 10 bp, Artificial Sequence
  Synthetic Polynucleotide
ggcaaccagc

SEQ ID NO: 2422 - DNA, 10 bp, Artificial Sequence
  Synthetic Polynucleotide
caactccacc

SEQ ID NO: 2423 - DNA, 10 bp, Artificial Sequence
  Synthetic Polynucleotide
gcatcatgct

SEQ ID NO: 2424 - DNA, 10 bp, Artificial Sequence
  Synthetic Polynucleotide
tccaccaaca

SEQ ID NO: 2425 - DNA, 10 bp, Artificial Sequence
  Synthetic Polynucleotide
tccgacttgt

SEQ ID NO: 2426 - DNA, 10 bp, Artificial Sequence
  Synthetic Polynucleotide
agccactctc

SEQ ID NO: 2427 - DNA, 10 bp, Artificial Sequence
  Synthetic Polynucleotide
atggggaacg

SEQ ID NO: 2428 - DNA, 10 bp, Artificial Sequence
  Synthetic Polynucleotide
tcgcttgagg

SEQ ID NO: 2429 - DNA, 10 bp, Artificial Sequence
  Synthetic Polynucleotide
atgaggagca

SEQ ID NO: 2430 - DNA, 10 bp, Artificial Sequence
  Synthetic Polynucleotide
tcctcttcca

SEQ ID NO: 2431 - DNA, 10 bp, Artificial Sequence
  Synthetic Polynucleotide
tctggaccaa

SEQ ID NO: 2432 - DNA, 10 bp, Artificial Sequence
  Synthetic Polynucleotide
agccatccat

SEQ ID NO: 2433 - DNA, 10 bp, Artificial Sequence
  Synthetic Polynucleotide
attgtggtgc

SEQ ID NO: 2434 - DNA, 10 bp, Artificial Sequence
  Synthetic Polynucleotide
acccatgcgt

SEQ ID NO: 2435 - DNA, 10 bp, Artificial Sequence
  Synthetic Polynucleotide
aaagatgcgg

SEQ ID NO: 2436 - DNA, 10 bp, Artificial Sequence
  Synthetic Polynucleotide
acaatgcgtt

SEQ ID NO: 2437 - DNA, 10 bp, Artificial Sequence
  Synthetic Polynucleotide
ctctgatgcc

SEQ ID NO: 2438 - DNA, 10 bp, Artificial Sequence
  Synthetic Polynucleotide
tcatgcccat

SEQ ID NO: 2439 - DNA, 10 bp, Artificial Sequence
  Synthetic Polynucleotide
tcacacggtc

SEQ ID NO: 2440 - DNA, 10 bp, Artificial Sequence
  Synthetic Polynucleotide
gtaagctccg

SEQ ID NO: 2441 - DNA, 10 bp, Artificial Sequence
  Synthetic Polynucleotide
acaggaaccg

SEQ ID NO: 2442 - DNA, 10 bp, Artificial Sequence
  Synthetic Polynucleotide
tgtttgcgtt

SEQ ID NO: 2443 - DNA, 10 bp, Artificial Sequence
  Synthetic Polynucleotide
taggcgatga

SEQ ID NO: 2444 - DNA, 10 bp, Artificial Sequence
  Synthetic Polynucleotide
tggcttctca

SEQ ID NO: 2445 - DNA, 10 bp, Artificial Sequence
  Synthetic Polynucleotide
ccgacctcaa

SEQ ID NO: 2446 - DNA, 10 bp, Artificial Sequence
  Synthetic Polynucleotide
ttgtggcgta

SEQ ID NO: 2447 - DNA, 10 bp, Artificial Sequence
  Synthetic Polynucleotide
caggtggtga

SEQ ID NO: 2448 - DNA, 10 bp, Artificial Sequence
  Synthetic Polynucleotide
cggttgtcta

SEQ ID NO: 2449 - DNA, 10 bp, Artificial Sequence
  Synthetic Polynucleotide
cggtggaagt

SEQ ID NO: 2450 - DNA, 10 bp, Artificial Sequence
  Synthetic Polynucleotide
actggacgtg

SEQ ID NO: 2451 - DNA, 10 bp, Artificial Sequence
  Synthetic Polynucleotide
tactgcaagc

SEQ ID NO: 2452 - DNA, 10 bp, Artificial Sequence
  Synthetic Polynucleotide
cgcttcgacg

SEQ ID NO: 2453 - DNA, 10 bp, Artificial Sequence
  Synthetic Polynucleotide
ctgtgcgatg

SEQ ID NO: 2454 - DNA, 10 bp, Artificial Sequence
  Synthetic Polynucleotide
caacatcgcc

SEQ ID NO: 2455 - DNA, 10 bp, Artificial Sequence
  Synthetic Polynucleotide
gatgcggaca

SEQ ID NO: 2456 - DNA, 10 bp, Artificial Sequence
  Synthetic Polynucleotide
caggagccag

SEQ ID NO: 2457 - DNA, 10 bp, Artificial Sequence
  Synthetic Polynucleotide
cttccgttcg

SEQ ID NO: 2458 - DNA, 10 bp, Artificial Sequence
  Synthetic Polynucleotide
cggcggagtc

SEQ ID NO: 2459 - DNA, 10 bp, Artificial Sequence
  Synthetic Polynucleotide
gccaccgagt

SEQ ID NO: 2460 - DNA, 10 bp, Artificial Sequence
  Synthetic Polynucleotide
ctggaatcgg

SEQ ID NO: 2461 - DNA, 10 bp, Artificial Sequence
  Synthetic Polynucleotide
ctgccctcaa

SEQ ID NO: 2462 - DNA, 10 bp, Artificial Sequence
  Synthetic Polynucleotide
caacctgctc

SEQ ID NO: 2463 - DNA, 10 bp, Artificial Sequence
  Synthetic Polynucleotide
atggtgctgg

SEQ ID NO: 2464 - DNA, 10 bp, Artificial Sequence
  Synthetic Polynucleotide
gcggtcagtt

SEQ ID NO: 2465 - DNA, 10 bp, Artificial Sequence
  Synthetic Polynucleotide
tgaacccgaa

SEQ ID NO: 2466 - DNA, 10 bp, Artificial Sequence
  Synthetic Polynucleotide
tcaggtccac

SEQ ID NO: 2467 - DNA, 10 bp, Artificial Sequence
  Synthetic Polynucleotide
tctgttgctg

SEQ ID NO: 2468 - DNA, 10 bp, Artificial Sequence
  Synthetic Polynucleotide
tttgcctgca

SEQ ID NO: 2469 - DNA, 10 bp, Artificial Sequence
  Synthetic Polynucleotide
atcggctgtt

SEQ ID NO: 2470 - DNA, 10 bp, Artificial Sequence
  Synthetic Polynucleotide
aacggcatta

SEQ ID NO: 2471 - DNA, 10 bp, Artificial Sequence
  Synthetic Polynucleotide
acaatgggga

SEQ ID NO: 2472 - DNA, 10 bp, Artificial Sequence
  Synthetic Polynucleotide
gtagcaaggc

SEQ ID NO: 2473 - DNA, 10 bp, Artificial Sequence
  Synthetic Polynucleotide
tcgcagtgtc

SEQ ID NO: 2474 - DNA, 10 bp, Artificial Sequence
  Synthetic Polynucleotide
gctacgaacc

SEQ ID NO: 2475 - DNA, 10 bp, Artificial Sequence
  Synthetic Polynucleotide
cattcgccaa

SEQ ID NO: 2476 - DNA, 10 bp, Artificial Sequence
  Synthetic Polynucleotide
tgccaacgct

SEQ ID NO: 2477 - DNA, 10 bp, Artificial Sequence
  Synthetic Polynucleotide
tcttcatgcg

SEQ ID NO: 2478 - DNA, 10 bp, Artificial Sequence
  Synthetic Polynucleotide
agccctcaat

SEQ ID NO: 2479 - DNA, 10 bp, Artificial Sequence
  Synthetic Polynucleotide
cagtgatgca

SEQ ID NO: 2480 - DNA, 10 bp, Artificial Sequence
  Synthetic Polynucleotide
agcccaagca

SEQ ID NO: 2481 - DNA, 10 bp, Artificial Sequence
  Synthetic Polynucleotide
agtgtcgcta

SEQ ID NO: 2482 - DNA, 10 bp, Artificial Sequence
  Synthetic Polynucleotide
accagcacgc

SEQ ID NO: 2483 - DNA, 10 bp, Artificial Sequence
  Synthetic Polynucleotide
cgctgacgag

SEQ ID NO: 2484 - DNA, 10 bp, Artificial Sequence
  Synthetic Polynucleotide
acgcttcctt

SEQ ID NO: 2485 - DNA, 10 bp, Artificial Sequence
  Synthetic Polynucleotide
gaccgaggtg

SEQ ID NO: 2486 - DNA, 10 bp, Artificial Sequence
  Synthetic Polynucleotide
acgctaacgc

SEQ ID NO: 2487 - DNA, 10 bp, Artificial Sequence
  Synthetic Polynucleotide
cggcaaactt

SEQ ID NO: 2488 - DNA, 10 bp, Artificial Sequence
  Synthetic Polynucleotide
tcgttcccat

SEQ ID NO: 2489 - DNA, 10 bp, Artificial Sequence
  Synthetic Polynucleotide
tggtgtgttg

SEQ ID NO: 2490 - DNA, 10 bp, Artificial Sequence
  Synthetic Polynucleotide
cttccggttc

SEQ ID NO: 2491 - DNA, 10 bp, Artificial Sequence
  Synthetic Polynucleotide
atcggcaaag

SEQ ID NO: 2492 - DNA, 10 bp, Artificial Sequence
  Synthetic Polynucleotide
ggcacccaag

SEQ ID NO: 2493 - DNA, 10 bp, Artificial Sequence
  Synthetic Polynucleotide
cccgcaaata

SEQ ID NO: 2494 - DNA, 10 bp, Artificial Sequence
  Synthetic Polynucleotide
tcctcgtgtg

SEQ ID NO: 2495 - DNA, 10 bp, Artificial Sequence
  Synthetic Polynucleotide
acgtcagcca

SEQ ID NO: 2496 - DNA, 10 bp, Artificial Sequence
  Synthetic Polynucleotide
acgctcgaag

SEQ ID NO: 2497 - DNA, 10 bp, Artificial Sequence
  Synthetic Polynucleotide
agggatacgc

SEQ ID NO: 2498 - DNA, 10 bp, Artificial Sequence
  Synthetic Polynucleotide
cgcaaccctt

SEQ ID NO: 2499 - DNA, 10 bp, Artificial Sequence
  Synthetic Polynucleotide
aacgctgagt

SEQ ID NO: 2500 - DNA, 10 bp, Artificial Sequence
  Synthetic Polynucleotide
tgccacccat

SEQ ID NO: 2501 - DNA, 10 bp, Artificial Sequence
  Synthetic Polynucleotide
tattccacgc

SEQ ID NO: 2502 - DNA, 10 bp, Artificial Sequence
  Synthetic Polynucleotide
tcttcaccct

SEQ ID NO: 2503 - DNA, 10 bp, Artificial Sequence
  Synthetic Polynucleotide
gcttccgcac

SEQ ID NO: 2504 - DNA, 10 bp, Artificial Sequence
  Synthetic Polynucleotide
tcctgcctgt

SEQ ID NO: 2505 - DNA, 10 bp, Artificial Sequence
  Synthetic Polynucleotide
tgaggactcc

SEQ ID NO: 2506 - DNA, 10 bp, Artificial Sequence
  Synthetic Polynucleotide
cgcaaccaag

SEQ ID NO: 2507 - DNA, 10 bp, Artificial Sequence
  Synthetic Polynucleotide
gcacaaggac

SEQ ID NO: 2508 - DNA, 10 bp, Artificial Sequence
  Synthetic Polynucleotide
agccatacgt

SEQ ID NO: 2509 - DNA, 10 bp, Artificial Sequence
  Synthetic Polynucleotide
acccaatcca

SEQ ID NO: 2510 - DNA, 10 bp, Artificial Sequence
  Synthetic Polynucleotide
tcgtccaagt

SEQ ID NO: 2511 - DNA, 10 bp, Artificial Sequence
  Synthetic Polynucleotide
agttggtgca

SEQ ID NO: 2512 - DNA, 10 bp, Artificial Sequence
  Synthetic Polynucleotide
cttccgccgc

SEQ ID NO: 2513 - DNA, 10 bp, Artificial Sequence
  Synthetic Polynucleotide
aagaggcgac

SEQ ID NO: 2514 - DNA, 10 bp, Artificial Sequence
  Synthetic Polynucleotide
tgtttcggta

SEQ ID NO: 2515 - DNA, 10 bp, Artificial Sequence
  Synthetic Polynucleotide
tccgcaaatg

SEQ ID NO: 2516 - DNA, 10 bp, Artificial Sequence
  Synthetic Polynucleotide
atcctcgggg

SEQ ID NO: 2517 - DNA, 10 bp, Artificial Sequence
  Synthetic Polynucleotide
ctcactgcgt

SEQ ID NO: 2518 - DNA, 10 bp, Artificial Sequence
  Synthetic Polynucleotide
atcaccgcca

SEQ ID NO: 2519 - DNA, 10 bp, Artificial Sequence
  Synthetic Polynucleotide
tcctccgtta

SEQ ID NO: 2520 - DNA, 10 bp, Artificial Sequence
  Synthetic Polynucleotide
tcgcaaccat

SEQ ID NO: 2521 - DNA, 10 bp, Artificial Sequence
  Synthetic Polynucleotide
ctgacagcca

SEQ ID NO: 2522 - DNA, 10 bp, Artificial Sequence
  Synthetic Polynucleotide
atcgccaatg

SEQ ID NO: 2523 - DNA, 10 bp, Artificial Sequence
  Synthetic Polynucleotide
cctgagtggt

SEQ ID NO: 2524 - DNA, 10 bp, Artificial Sequence
  Synthetic Polynucleotide
tcttggacgt

SEQ ID NO: 2525 - DNA, 10 bp, Artificial Sequence
  Synthetic Polynucleotide
tcggtaaagc

SEQ ID NO: 2526 - DNA, 10 bp, Artificial Sequence
  Synthetic Polynucleotide
tgcagcattt

SEQ ID NO: 2527 - DNA, 10 bp, Artificial Sequence
  Synthetic Polynucleotide
tgcttgcttt

SEQ ID NO: 2528 - DNA, 10 bp, Artificial Sequence
  Synthetic Polynucleotide
acgttgccaa

SEQ ID NO: 2529 - DNA, 10 bp, Artificial Sequence
  Synthetic Polynucleotide
acaatgggga

SEQ ID NO: 2530 - DNA, 10 bp, Artificial Sequence
  Synthetic Polynucleotide
tcagcccaaa

SEQ ID NO: 2531 - DNA, 10 bp, Artificial Sequence
  Synthetic Polynucleotide
taagcgttcc

SEQ ID NO: 2532 - DNA, 10 bp, Artificial Sequence
  Synthetic Polynucleotide
aaacatcgcg

SEQ ID NO: 2533 - DNA, 10 bp, Artificial Sequence
  Synthetic Polynucleotide
tctcaatgcg

SEQ ID NO: 2534 - DNA, 10 bp, Artificial Sequence
  Synthetic Polynucleotide
tcgcaaccat

SEQ ID NO: 2535 - DNA, 10 bp, Artificial Sequence
  Synthetic Polynucleotide
cgcgttacag

SEQ ID NO: 2536 - DNA, 10 bp, Artificial Sequence
  Synthetic Polynucleotide
gtcggacagg

SEQ ID NO: 2537 - DNA, 10 bp, Artificial Sequence
  Synthetic Polynucleotide
gtgctacagc

SEQ ID NO: 2538 - DNA, 10 bp, Artificial Sequence
  Synthetic Polynucleotide
gctatctggc

SEQ ID NO: 2539 - DNA, 10 bp, Artificial Sequence
  Synthetic Polynucleotide
tcgctcaaag

SEQ ID NO: 2540 - DNA, 10 bp, Artificial Sequence
  Synthetic Polynucleotide
gaaatgccca

SEQ ID NO: 2541 - DNA, 10 bp, Artificial Sequence
  Synthetic Polynucleotide
gcgttcacta

SEQ ID NO: 2542 - DNA, 10 bp, Artificial Sequence
  Synthetic Polynucleotide
gccaacggtc

SEQ ID NO: 2543 - DNA, 10 bp, Artificial Sequence
  Synthetic Polynucleotide
actcggatcc

SEQ ID NO: 2544 - DNA, 10 bp, Artificial Sequence
  Synthetic Polynucleotide
cacagtcgca

SEQ ID NO: 2545 - DNA, 10 bp, Artificial Sequence
  Synthetic Polynucleotide
atgctcccgc

SEQ ID NO: 2546 - DNA, 10 bp, Artificial Sequence
  Synthetic Polynucleotide
gccgccttgt

SEQ ID NO: 2547 - DNA, 10 bp, Artificial Sequence
  Synthetic Polynucleotide
ctcaaagcgt

SEQ ID NO: 2548 - DNA, 10 bp, Artificial Sequence
  Synthetic Polynucleotide
cccgtcgcca

SEQ ID NO: 2549 - DNA, 10 bp, Artificial Sequence
  Synthetic Polynucleotide
cagcaagcaa

SEQ ID NO: 2550 - DNA, 10 bp, Artificial Sequence
  Synthetic Polynucleotide
gcgaactcca

SEQ ID NO: 2551 - DNA, 10 bp, Artificial Sequence
  Synthetic Polynucleotide
tcgatgctta

SEQ ID NO: 2552 - DNA, 10 bp, Artificial Sequence
  Synthetic Polynucleotide
acggacattg

SEQ ID NO: 2553 - DNA, 10 bp, Artificial Sequence
  Synthetic Polynucleotide
tggtggtgct

SEQ ID NO: 2554 - DNA, 10 bp, Artificial Sequence
  Synthetic Polynucleotide
cctctgaccc

SEQ ID NO: 2555 - DNA, 10 bp, Artificial Sequence
  Synthetic Polynucleotide
tcacgtcctg

SEQ ID NO: 2556 - DNA, 10 bp, Artificial Sequence
  Synthetic Polynucleotide
ccgggcacta

SEQ ID NO: 2557 - DNA, 10 bp, Artificial Sequence
  Synthetic Polynucleotide
tgttgacgcg

SEQ ID NO: 2558 - DNA, 10 bp, Artificial Sequence
  Synthetic Polynucleotide
tttgtagcgc

SEQ ID NO: 2559 - DNA, 10 bp, Artificial Sequence
  Synthetic Polynucleotide
tgttgtcagc

SEQ ID NO: 2560 - DNA, 10 bp, Artificial Sequence
  Synthetic Polynucleotide
tctcccatga

SEQ ID NO: 2561 - DNA, 10 bp, Artificial Sequence
  Synthetic Polynucleotide
tgactttgcg

SEQ ID NO: 2562 - DNA, 10 bp, Artificial Sequence
  Synthetic Polynucleotide
acttgacggg

SEQ ID NO: 2563 - DNA, 10 bp, Artificial Sequence
  Synthetic Polynucleotide
ccagcagcag

SEQ ID NO: 2564 - DNA, 10 bp, Artificial Sequence
  Synthetic Polynucleotide
tcacaagcct

SEQ ID NO: 2565 - DNA, 10 bp, Artificial Sequence
  Synthetic Polynucleotide
acacacgatg

SEQ ID NO: 2566 - DNA, 10 bp, Artificial Sequence
  Synthetic Polynucleotide
tctgggctct

SEQ ID NO: 2567 - DNA, 10 bp, Artificial Sequence
  Synthetic Polynucleotide
gtggtcgctc

SEQ ID NO: 2568 - DNA, 10 bp, Artificial Sequence
  Synthetic Polynucleotide
tgtcgccata

SEQ ID NO: 2569 - DNA, 10 bp, Artificial Sequence
  Synthetic Polynucleotide
aacggtgcgg

SEQ ID NO: 2570 - DNA, 10 bp, Artificial Sequence
  Synthetic Polynucleotide
gctagggtgg

SEQ ID NO: 2571 - DNA, 10 bp, Artificial Sequence
  Synthetic Polynucleotide
tgtggttgga

SEQ ID NO: 2572 - DNA, 10 bp, Artificial Sequence
  Synthetic Polynucleotide
tcgaagggac

SEQ ID NO: 2573 - DNA, 10 bp, Artificial Sequence
  Synthetic Polynucleotide
tgcgattgtt

SEQ ID NO: 2574 - DNA, 10 bp, Artificial Sequence
  Synthetic Polynucleotide
gcgcttgaat

SEQ ID NO: 2575 - DNA, 10 bp, Artificial Sequence
  Synthetic Polynucleotide
tccgttttga

SEQ ID NO: 2576 - DNA, 10 bp, Artificial Sequence
  Synthetic Polynucleotide
tcgcaagtca

SEQ ID NO: 2577 - DNA, 10 bp, Artificial Sequence
  Synthetic Polynucleotide
gccaatggtc

SEQ ID NO: 2578 - DNA, 10 bp, Artificial Sequence
  Synthetic Polynucleotide
ccgcctgaac

SEQ ID NO: 2579 - DNA, 10 bp, Artificial Sequence
  Synthetic Polynucleotide
acagccagtc

SEQ ID NO: 2580 - DNA, 10 bp, Artificial Sequence
  Synthetic Polynucleotide
cgattagccc

SEQ ID NO: 2581 - DNA, 10 bp, Artificial Sequence
  Synthetic Polynucleotide
gctacagcta

SEQ ID NO: 2582 - DNA, 10 bp, Artificial Sequence
  Synthetic Polynucleotide
gtgtcagcaa

SEQ ID NO: 2583 - DNA, 10 bp, Artificial Sequence
  Synthetic Polynucleotide
gcgaacagtg

SEQ ID NO: 2584 - DNA, 10 bp, Artificial Sequence
  Synthetic Polynucleotide
gccaatgtgg

SEQ ID NO: 2585 - DNA, 10 bp, Artificial Sequence
  Synthetic Polynucleotide
gatgccagtc

SEQ ID NO: 2586 - DNA, 10 bp, Artificial Sequence
  Synthetic Polynucleotide
acacgtcgag

SEQ ID NO: 2587 - DNA, 10 bp, Artificial Sequence
  Synthetic Polynucleotide
gaactgcctg

SEQ ID NO: 2588 - DNA, 10 bp, Artificial Sequence
  Synthetic Polynucleotide
acgttgccaa

SEQ ID NO: 2589 - DNA, 10 bp, Artificial Sequence
  Synthetic Polynucleotide
acaggaacca

SEQ ID NO: 2590 - DNA, 10 bp, Artificial Sequence
  Synthetic Polynucleotide
tgttgtcgta

SEQ ID NO: 2591 - DNA, 10 bp, Artificial Sequence
  Synthetic Polynucleotide
cgtcagccac

SEQ ID NO: 2592 - DNA, 10 bp, Artificial Sequence
  Synthetic Polynucleotide
agccgtcaat

SEQ ID NO: 2593 - DNA, 10 bp, Artificial Sequence
  Synthetic Polynucleotide
tgacaccagg

SEQ ID NO: 2594 - DNA, 10 bp, Artificial Sequence
  Synthetic Polynucleotide
gaggtacgct

SEQ ID NO: 2595 - DNA, 10 bp, Artificial Sequence
  Synthetic Polynucleotide
agcgaattgg

SEQ ID NO: 2596 - DNA, 10 bp, Artificial Sequence
  Synthetic Polynucleotide
gtcagggtgt

SEQ ID NO: 2597 - DNA, 10 bp, Artificial Sequence
  Synthetic Polynucleotide
atgttgacgc

SEQ ID NO: 2598 - DNA, 10 bp, Artificial Sequence
  Synthetic Polynucleotide
attacgccga

SEQ ID NO: 2599 - DNA, 10 bp, Artificial Sequence
  Synthetic Polynucleotide
cgtgcttaca

SEQ ID NO: 2600 - DNA, 10 bp, Artificial Sequence
  Synthetic Polynucleotide
tgctcaccat

SEQ ID NO: 2601 - DNA, 10 bp, Artificial Sequence
  Synthetic Polynucleotide
tgtgatgcca

SEQ ID NO: 2602 - DNA, 10 bp, Artificial Sequence
  Synthetic Polynucleotide
actccacacg

SEQ ID NO: 2603 - DNA, 10 bp, Artificial Sequence
  Synthetic Polynucleotide
cccgatctgt

SEQ ID NO: 2604 - DNA, 10 bp, Artificial Sequence
  Synthetic Polynucleotide
gcatcgaagc

SEQ ID NO: 2605 - DNA, 10 bp, Artificial Sequence
  Synthetic Polynucleotide
tgctaatcgc

SEQ ID NO: 2606 - DNA, 10 bp, Artificial Sequence
  Synthetic Polynucleotide
accaacggaa

SEQ ID NO: 2607 - DNA, 10 bp, Artificial Sequence
  Synthetic Polynucleotide
aggatggctt

SEQ ID NO: 2608 - DNA, 10 bp, Artificial Sequence
  Synthetic Polynucleotide
aacatgccca

SEQ ID NO: 2609 - DNA, 10 bp, Artificial Sequence
  Synthetic Polynucleotide
gattgcagca

SEQ ID NO: 2610 - DNA, 10 bp, Artificial Sequence
  Synthetic Polynucleotide
taacgctccc

SEQ ID NO: 2611 - DNA, 10 bp, Artificial Sequence
  Synthetic Polynucleotide
ctacggagga

SEQ ID NO: 2612 - DNA, 10 bp, Artificial Sequence
  Synthetic Polynucleotide
tgcagcttca

SEQ ID NO: 2613 - DNA, 10 bp, Artificial Sequence
  Synthetic Polynucleotide
cgcatttcca

SEQ ID NO: 2614 - DNA, 10 bp, Artificial Sequence
  Synthetic Polynucleotide
atgcacgcag

SEQ ID NO: 2615 - DNA, 10 bp, Artificial Sequence
  Synthetic Polynucleotide
aacgtgtcct

SEQ ID NO: 2616 - DNA, 10 bp, Artificial Sequence
  Synthetic Polynucleotide
tgtatccggc

SEQ ID NO: 2617 - DNA, 10 bp, Artificial Sequence
  Synthetic Polynucleotide
actccagccg

SEQ ID NO: 2618 - DNA, 10 bp, Artificial Sequence
  Synthetic Polynucleotide
taatgccgcg

SEQ ID NO: 2619 - DNA, 10 bp, Artificial Sequence
  Synthetic Polynucleotide
taaacctgcc

SEQ ID NO: 2620 - DNA, 10 bp, Artificial Sequence
  Synthetic Polynucleotide
cagccttctg

SEQ ID NO: 2621 - DNA, 10 bp, Artificial Sequence
  Synthetic Polynucleotide
gtcaagagcc

SEQ ID NO: 2622 - DNA, 10 bp, Artificial Sequence
  Synthetic Polynucleotide
atccaccgta

SEQ ID NO: 2623 - DNA, 10 bp, Artificial Sequence
  Synthetic Polynucleotide
gggttgatgg

SEQ ID NO: 2624 - DNA, 10 bp, Artificial Sequence
  Synthetic Polynucleotide
tctaccagca

SEQ ID NO: 2625 - DNA, 10 bp, Artificial Sequence
  Synthetic Polynucleotide
cacgcaatgc

SEQ ID NO: 2626 - DNA, 10 bp, Artificial Sequence
  Synthetic Polynucleotide
ctggttgcac

SEQ ID NO: 2627 - DNA, 10 bp, Artificial Sequence
  Synthetic Polynucleotide
caccagacga

SEQ ID NO: 2628 - DNA, 10 bp, Artificial Sequence
  Synthetic Polynucleotide
cgtcaaagct

SEQ ID NO: 2629 - DNA, 10 bp, Artificial Sequence
  Synthetic Polynucleotide
accccttcta

SEQ ID NO: 2630 - DNA, 10 bp, Artificial Sequence
  Synthetic Polynucleotide
cacgccttgt

SEQ ID NO: 2631 - DNA, 10 bp, Artificial Sequence
  Synthetic Polynucleotide
ggagaggagg

SEQ ID NO: 2632 - DNA, 10 bp, Artificial Sequence
  Synthetic Polynucleotide
cgtcaactgt

SEQ ID NO: 2633 - DNA, 10 bp, Artificial Sequence
  Synthetic Polynucleotide
gcaaaacgtg

SEQ ID NO: 2634 - DNA, 10 bp, Artificial Sequence
  Synthetic Polynucleotide
tacgcatcaa

SEQ ID NO: 2635 - DNA, 10 bp, Artificial Sequence
  Synthetic Polynucleotide
cgaccaacaa

SEQ ID NO: 2636 - DNA, 10 bp, Artificial Sequence
  Synthetic Polynucleotide
tttctgctgc

SEQ ID NO: 2637 - DNA, 10 bp, Artificial Sequence
  Synthetic Polynucleotide
tgctgatgga

SEQ ID NO: 2638 - DNA, 10 bp, Artificial Sequence
  Synthetic Polynucleotide
tctgtcgcca

SEQ ID NO: 2639 - DNA, 10 bp, Artificial Sequence
  Synthetic Polynucleotide
tcatggatgc

SEQ ID NO: 2640 - DNA, 10 bp, Artificial Sequence
  Synthetic Polynucleotide
attgacgcac

SEQ ID NO: 2641 - DNA, 10 bp, Artificial Sequence
  Synthetic Polynucleotide
tcctccaccc

SEQ ID NO: 2642 - DNA, 10 bp, Artificial Sequence
  Synthetic Polynucleotide
ctgattggca

SEQ ID NO: 2643 - DNA, 10 bp, Artificial Sequence
  Synthetic Polynucleotide
cgcaggttgg

SEQ ID NO: 2644 - DNA, 10 bp, Artificial Sequence
  Synthetic Polynucleotide
cctgatccca

SEQ ID NO: 2645 - DNA, 10 bp, Artificial Sequence
  Synthetic Polynucleotide
tagccgttgg

SEQ ID NO: 2646 - DNA, 10 bp, Artificial Sequence
  Synthetic Polynucleotide
tccagctcag

SEQ ID NO: 2647 - DNA, 10 bp, Artificial Sequence
  Synthetic Polynucleotide
accactgagc

SEQ ID NO: 2648 - DNA, 10 bp, Artificial Sequence
  Synthetic Polynucleotide
tcaggacgta

SEQ ID NO: 2649 - DNA, 10 bp, Artificial Sequence
  Synthetic Polynucleotide
gctagaccga

SEQ ID NO: 2650 - DNA, 10 bp, Artificial Sequence
  Synthetic Polynucleotide
tgcgggttcg

SEQ ID NO: 2651 - DNA, 10 bp, Artificial Sequence
  Synthetic Polynucleotide
cgcaagacaa

SEQ ID NO: 2652 - DNA, 10 bp, Artificial Sequence
  Synthetic Polynucleotide
cccattgacc

SEQ ID NO: 2653 - DNA, 10 bp, Artificial Sequence
  Synthetic Polynucleotide
tgcaagatgg

SEQ ID NO: 2654 - DNA, 10 bp, Artificial Sequence
  Synthetic Polynucleotide
ggcagagtta

SEQ ID NO: 2655 - DNA, 10 bp, Artificial Sequence
  Synthetic Polynucleotide
cgtaccacga

SEQ ID NO: 2656 - DNA, 10 bp, Artificial Sequence
  Synthetic Polynucleotide
tgacccggtg

SEQ ID NO: 2657 - DNA, 10 bp, Artificial Sequence
  Synthetic Polynucleotide
cgattagcgg

SEQ ID NO: 2658 - DNA, 10 bp, Artificial Sequence
  Synthetic Polynucleotide
ttcgtcaggc

SEQ ID NO: 2659 - DNA, 10 bp, Artificial Sequence
  Synthetic Polynucleotide
tggctcagca

SEQ ID NO: 2660 - DNA, 10 bp, Artificial Sequence
  Synthetic Polynucleotide
tggtggatcc

SEQ ID NO: 2661 - DNA, 10 bp, Artificial Sequence
  Synthetic Polynucleotide
ggaaacacgc

SEQ ID NO: 2662 - DNA, 10 bp, Artificial Sequence
  Synthetic Polynucleotide
tatgcacagc

SEQ ID NO: 2663 - DNA, 10 bp, Artificial Sequence
  Synthetic Polynucleotide
tggctttcgt

SEQ ID NO: 2664 - DNA, 10 bp, Artificial Sequence
  Synthetic Polynucleotide
tgttgcgatt

SEQ ID NO: 2665 - DNA, 10 bp, Artificial Sequence
  Synthetic Polynucleotide
tgcgtctact

SEQ ID NO: 2666 - DNA, 10 bp, Artificial Sequence
  Synthetic Polynucleotide
tttcacgcct

SEQ ID NO: 2667 - DNA, 10 bp, Artificial Sequence
  Synthetic Polynucleotide
gcagcgaggt

SEQ ID NO: 2668 - DNA, 10 bp, Artificial Sequence
  Synthetic Polynucleotide
gctatcggta

SEQ ID NO: 2669 - DNA, 10 bp, Artificial Sequence
  Synthetic Polynucleotide
tgggttgtga

SEQ ID NO: 2670 - DNA, 10 bp, Artificial Sequence
  Synthetic Polynucleotide
tgggtggaag

SEQ ID NO: 2671 - DNA, 10 bp, Artificial Sequence
  Synthetic Polynucleotide
tcgtagtcca

SEQ ID NO: 2672 - DNA, 10 bp, Artificial Sequence
  Synthetic Polynucleotide
ccttcccctt

SEQ ID NO: 2673 - DNA, 10 bp, Artificial Sequence
  Synthetic Polynucleotide
cctgcgaacg

SEQ ID NO: 2674 - DNA, 10 bp, Artificial Sequence
  Synthetic Polynucleotide
gcggcttcaa

SEQ ID NO: 2675 - DNA, 10 bp, Artificial Sequence
  Synthetic Polynucleotide
agctgtcaga

SEQ ID NO: 2676 - DNA, 10 bp, Artificial Sequence
  Synthetic Polynucleotide
ccctgatgct

SEQ ID NO: 2677 - DNA, 10 bp, Artificial Sequence
  Synthetic Polynucleotide
tcattgtggc

SEQ ID NO: 2678 - DNA, 10 bp, Artificial Sequence
  Synthetic Polynucleotide
gagcgatgca

SEQ ID NO: 2679 - DNA, 10 bp, Artificial Sequence
  Synthetic Polynucleotide
ccctcgtagc

SEQ ID NO: 2680 - DNA, 10 bp, Artificial Sequence
  Synthetic Polynucleotide
tgggtgacaa

SEQ ID NO: 2681 - DNA, 10 bp, Artificial Sequence
  Synthetic Polynucleotide
ggtgtgcctg

SEQ ID NO: 2682 - DNA, 10 bp, Artificial Sequence
  Synthetic Polynucleotide
ttggggatcc

SEQ ID NO: 2683 - DNA, 10 bp, Artificial Sequence
  Synthetic Polynucleotide
gagggatgca

SEQ ID NO: 2684 - DNA, 10 bp, Artificial Sequence
  Synthetic Polynucleotide
tcaactcagc

SEQ ID NO: 2685 - DNA, 10 bp, Artificial Sequence
  Synthetic Polynucleotide
agacggaagt

SEQ ID NO: 2686 - DNA, 10 bp, Artificial Sequence
  Synthetic Polynucleotide
taccaagcta

SEQ ID NO: 2687 - DNA, 10 bp, Artificial Sequence
  Synthetic Polynucleotide
acagatggga

SEQ ID NO: 2688 - DNA, 10 bp, Artificial Sequence
  Synthetic Polynucleotide
ccactccaca

SEQ ID NO: 2689 - DNA, 10 bp, Artificial Sequence
  Synthetic Polynucleotide
attcgctggt

SEQ ID NO: 2690 - DNA, 10 bp, Artificial Sequence
  Synthetic Polynucleotide
cccttccgtt

SEQ ID NO: 2691 - DNA, 10 bp, Artificial Sequence
  Synthetic Polynucleotide
tggaggaaga

SEQ ID NO: 2692 - DNA, 10 bp, Artificial Sequence
  Synthetic Polynucleotide
tccacaagct

SEQ ID NO: 2693 - DNA, 10 bp, Artificial Sequence
  Synthetic Polynucleotide
tgttgcgggg

SEQ ID NO: 2694 - DNA, 10 bp, Artificial Sequence
  Synthetic Polynucleotide
cttcgagcag

SEQ ID NO: 2695 - DNA, 10 bp, Artificial Sequence
  Synthetic Polynucleotide
ccaccaaaca

SEQ ID NO: 2696 - DNA, 10 bp, Artificial Sequence
  Synthetic Polynucleotide
catggaagcc

SEQ ID NO: 2697 - DNA, 10 bp, Artificial Sequence
  Synthetic Polynucleotide
tggcggtgtg

SEQ ID NO: 2698 - DNA, 10 bp, Artificial Sequence
  Synthetic Polynucleotide
acctcaagcg

SEQ ID NO: 2699 - DNA, 10 bp, Artificial Sequence
  Synthetic Polynucleotide
aagaggcgtt

SEQ ID NO: 2700 - DNA, 10 bp, Artificial Sequence
  Synthetic Polynucleotide
cgtctcatcg

SEQ ID NO: 2701 - DNA, 10 bp, Artificial Sequence
  Synthetic Polynucleotide
tggtcgtgaa

SEQ ID NO: 2702 - DNA, 10 bp, Artificial Sequence
  Synthetic Polynucleotide
tccagttgca

SEQ ID NO: 2703 - DNA, 10 bp, Artificial Sequence
  Synthetic Polynucleotide
acgaatggcg

SEQ ID NO: 2704 - DNA, 10 bp, Artificial Sequence
  Synthetic Polynucleotide
gaagcatgga

SEQ ID NO: 2705 - DNA, 10 bp, Artificial Sequence
  Synthetic Polynucleotide
acggatcgta

SEQ ID NO: 2706 - DNA, 10 bp, Artificial Sequence
  Synthetic Polynucleotide
ggcatgtccg

SEQ ID NO: 2707 - DNA, 10 bp, Artificial Sequence
  Synthetic Polynucleotide
gcaagctgat

SEQ ID NO: 2708 - DNA, 10 bp, Artificial Sequence
  Synthetic Polynucleotide
atgaccgtga

SEQ ID NO: 2709 - DNA, 10 bp, Artificial Sequence
  Synthetic Polynucleotide
ggctcagatg

SEQ ID NO: 2710 - DNA, 10 bp, Artificial Sequence
  Synthetic Polynucleotide
ctgttccagc

SEQ ID NO: 2711 - DNA, 10 bp, Artificial Sequence
  Synthetic Polynucleotide
ggtggaggat

SEQ ID NO: 2712 - DNA, 10 bp, Artificial Sequence
  Synthetic Polynucleotide
caaccacgtc

SEQ ID NO: 2713 - DNA, 10 bp, Artificial Sequence
  Synthetic Polynucleotide
tggatggcta

SEQ ID NO: 2714 - DNA, 10 bp, Artificial Sequence
  Synthetic Polynucleotide
tgagcgattg

SEQ ID NO: 2715 - DNA, 10 bp, Artificial Sequence
  Synthetic Polynucleotide
ttgagcgagt

SEQ ID NO: 2716 - DNA, 10 bp, Artificial Sequence
  Synthetic Polynucleotide
gggtcgggtg

SEQ ID NO: 2717 - DNA, 10 bp, Artificial Sequence
  Synthetic Polynucleotide
acgaagacga

SEQ ID NO: 2718 - DNA, 10 bp, Artificial Sequence
  Synthetic Polynucleotide
gcaccttcac

SEQ ID NO: 2719 - DNA, 10 bp, Artificial Sequence
  Synthetic Polynucleotide
gatgtgccag

SEQ ID NO: 2720 - DNA, 10 bp, Artificial Sequence
  Synthetic Polynucleotide
tgtcgtagga

SEQ ID NO: 2721 - DNA, 10 bp, Artificial Sequence
  Synthetic Polynucleotide
cgtcaggaac

SEQ ID NO: 2722 - DNA, 10 bp, Artificial Sequence
  Synthetic Polynucleotide
tcacgtttgg

SEQ ID NO: 2723 - DNA, 10 bp, Artificial Sequence
  Synthetic Polynucleotide
agagcagacg

SEQ ID NO: 2724 - DNA, 10 bp, Artificial Sequence
  Synthetic Polynucleotide
ttggcgtgtg

SEQ ID NO: 2725 - DNA, 10 bp, Artificial Sequence
  Synthetic Polynucleotide
tgagcgtaga

SEQ ID NO: 2726 - DNA, 10 bp, Artificial Sequence
  Synthetic Polynucleotide
tgatgtccca

SEQ ID NO: 2727 - DNA, 10 bp, Artificial Sequence
  Synthetic Polynucleotide
tccctgtgcg

SEQ ID NO: 2728 - DNA, 10 bp, Artificial Sequence
  Synthetic Polynucleotide
ggcagagcag

SEQ ID NO: 2729 - DNA, 10 bp, Artificial Sequence
  Synthetic Polynucleotide
tactcgcctt

SEQ ID NO: 2730 - DNA, 10 bp, Artificial Sequence
  Synthetic Polynucleotide
ttctgtgtgc

SEQ ID NO: 2731 - DNA, 10 bp, Artificial Sequence
  Synthetic Polynucleotide
agacgctggt

SEQ ID NO: 2732 - DNA, 10 bp, Artificial Sequence
  Synthetic Polynucleotide
cccgcatgat

SEQ ID NO: 2733 - DNA, 10 bp, Artificial Sequence
  Synthetic Polynucleotide
cgctcatcct

SEQ ID NO: 2734 - DNA, 10 bp, Artificial Sequence
  Synthetic Polynucleotide
gtccatccca

SEQ ID NO: 2735 - DNA, 10 bp, Artificial Sequence
  Synthetic Polynucleotide
acgattggtg

SEQ ID NO: 2736 - DNA, 10 bp, Artificial Sequence
  Synthetic Polynucleotide
atgcaacgta

SEQ ID NO: 2737 - DNA, 10 bp, Artificial Sequence
  Synthetic Polynucleotide
acgtggattg

SEQ ID NO: 2738 - DNA, 10 bp, Artificial Sequence
  Synthetic Polynucleotide
gtcaactcgg

SEQ ID NO: 2739 - DNA, 10 bp, Artificial Sequence
  Synthetic Polynucleotide
tgagtgggag

SEQ ID NO: 2740 - DNA, 10 bp, Artificial Sequence
  Synthetic Polynucleotide
aacgcctctt

SEQ ID NO: 2741 - DNA, 10 bp, Artificial Sequence
  Synthetic Polynucleotide
tgcttttcga

SEQ ID NO: 2742 - DNA, 10 bp, Artificial Sequence
  Synthetic Polynucleotide
gtcggtccta

SEQ ID NO: 2743 - DNA, 10 bp, Artificial Sequence
  Synthetic Polynucleotide
agttggtgca

SEQ ID NO: 2744 - DNA, 10 bp, Artificial Sequence
  Synthetic Polynucleotide
gtcgtcacca

SEQ ID NO: 2745 - DNA, 10 bp, Artificial Sequence
  Synthetic Polynucleotide
tgcgaacagt

SEQ ID NO: 2746 - DNA, 10 bp, Artificial Sequence
  Synthetic Polynucleotide
cgacgctaat

SEQ ID NO: 2747 - DNA, 10 bp, Artificial Sequence
  Synthetic Polynucleotide
gtgcagatgg

SEQ ID NO: 2748 - DNA, 10 bp, Artificial Sequence
  Synthetic Polynucleotide
aaccacctca

SEQ ID NO: 2749 - DNA, 10 bp, Artificial Sequence
  Synthetic Polynucleotide
cgatggcgtt

SEQ ID NO: 2750 - DNA, 10 bp, Artificial Sequence
  Synthetic Polynucleotide
gtagcgtcag

SEQ ID NO: 2751 - DNA, 10 bp, Artificial Sequence
  Synthetic Polynucleotide
gcttgagtgg

SEQ ID NO: 2752 - DNA, 10 bp, Artificial Sequence
  Synthetic Polynucleotide
cgtccgaagt

SEQ ID NO: 2753 - DNA, 10 bp, Artificial Sequence
  Synthetic Polynucleotide
tggaagcagc

SEQ ID NO: 2754 - DNA, 10 bp, Artificial Sequence
  Synthetic Polynucleotide
gcccggtaga

SEQ ID NO: 2755 - DNA, 10 bp, Artificial Sequence
  Synthetic Polynucleotide
tctcgctttg

SEQ ID NO: 2756 - DNA, 10 bp, Artificial Sequence
  Synthetic Polynucleotide
cagaagtgca

SEQ ID NO: 2757 - DNA, 10 bp, Artificial Sequence
  Synthetic Polynucleotide
tcctcgttgt

SEQ ID NO: 2758 - DNA, 10 bp, Artificial Sequence
  Synthetic Polynucleotide
tgcatccact

SEQ ID NO: 2759 - DNA, 10 bp, Artificial Sequence
  Synthetic Polynucleotide
cagttgggtg

SEQ ID NO: 2760 - DNA, 10 bp, Artificial Sequence
  Synthetic Polynucleotide
tggtacaccc

SEQ ID NO: 2761 - DNA, 10 bp, Artificial Sequence
  Synthetic Polynucleotide
agcttgtgga

SEQ ID NO: 2762 - DNA, 10 bp, Artificial Sequence
  Synthetic Polynucleotide
gcatctcgtt

SEQ ID NO: 2763 - DNA, 10 bp, Artificial Sequence
  Synthetic Polynucleotide
cgtaagctgg

SEQ ID NO: 2764 - DNA, 10 bp, Artificial Sequence
  Synthetic Polynucleotide
cctgagccag

SEQ ID NO: 2765 - DNA, 10 bp, Artificial Sequence
  Synthetic Polynucleotide
tgctgagtgg

SEQ ID NO: 2766 - DNA, 10 bp, Artificial Sequence
  Synthetic Polynucleotide
ccgttgcaag

SEQ ID NO: 2767 - DNA, 10 bp, Artificial Sequence
  Synthetic Polynucleotide
tatgtggccc

SEQ ID NO: 2768 - DNA, 10 bp, Artificial Sequence
  Synthetic Polynucleotide
taccctcctt

SEQ ID NO: 2769 - DNA, 10 bp, Artificial Sequence
  Synthetic Polynucleotide
cggttatggg

SEQ ID NO: 2770 - DNA, 10 bp, Artificial Sequence
  Synthetic Polynucleotide
tcatcaagcc

SEQ ID NO: 2771 - DNA, 10 bp, Artificial Sequence
  Synthetic Polynucleotide
cggacaatga

SEQ ID NO: 2772 - DNA, 10 bp, Artificial Sequence
  Synthetic Polynucleotide
cacctgccat

SEQ ID NO: 2773 - DNA, 10 bp, Artificial Sequence
  Synthetic Polynucleotide
acgacgttcg

SEQ ID NO: 2774 - DNA, 10 bp, Artificial Sequence
  Synthetic Polynucleotide
tcttgggcaa

SEQ ID NO: 2775 - DNA, 10 bp, Artificial Sequence
  Synthetic Polynucleotide
gtgtggttga

SEQ ID NO: 2776 - DNA, 10 bp, Artificial Sequence
  Synthetic Polynucleotide
ggatgctcgt

SEQ ID NO: 2777 - DNA, 10 bp, Artificial Sequence
  Synthetic Polynucleotide
cgatgccact

SEQ ID NO: 2778 - DNA, 10 bp, Artificial Sequence
  Synthetic Polynucleotide
ctcgcctttc

SEQ ID NO: 2779 - DNA, 10 bp, Artificial Sequence
  Synthetic Polynucleotide
gacggtcagt

SEQ ID NO: 2780 - DNA, 10 bp, Artificial Sequence
  Synthetic Polynucleotide
ctgctcagtc

SEQ ID NO: 2781 - DNA, 10 bp, Artificial Sequence
  Synthetic Polynucleotide
aaccccggtg

SEQ ID NO: 2782 - DNA, 10 bp, Artificial Sequence
  Synthetic Polynucleotide
tgagtgggtg

SEQ ID NO: 2783 - DNA, 10 bp, Artificial Sequence
  Synthetic Polynucleotide
gagttagccg

SEQ ID NO: 2784 - DNA, 10 bp, Artificial Sequence
  Synthetic Polynucleotide
ctctggctga

SEQ ID NO: 2785 - DNA, 10 bp, Artificial Sequence
  Synthetic Polynucleotide
ctgggatgga

SEQ ID NO: 2786 - DNA, 10 bp, Artificial Sequence
  Synthetic Polynucleotide
tgcgacaatc

SEQ ID NO: 2787 - DNA, 10 bp, Artificial Sequence
  Synthetic Polynucleotide
tggtgagaga

SEQ ID NO: 2788 - DNA, 10 bp, Artificial Sequence
  Synthetic Polynucleotide
tggtctagcg

SEQ ID NO: 2789 - DNA, 10 bp, Artificial Sequence
  Synthetic Polynucleotide
ggacatgcct

SEQ ID NO: 2790 - DNA, 10 bp, Artificial Sequence
  Synthetic Polynucleotide
cgtagctgta

SEQ ID NO: 2791 - DNA, 10 bp, Artificial Sequence
  Synthetic Polynucleotide
tgaaacggca

SEQ ID NO: 2792 - DNA, 10 bp, Artificial Sequence
  Synthetic Polynucleotide
tcggctcctt

SEQ ID NO: 2793 - DNA, 10 bp, Artificial Sequence
  Synthetic Polynucleotide
gatgcggata

SEQ ID NO: 2794 - DNA, 10 bp, Artificial Sequence
  Synthetic Polynucleotide
catcgccaaa

SEQ ID NO: 2795 - DNA, 10 bp, Artificial Sequence
  Synthetic Polynucleotide
ggttgatgca

SEQ ID NO: 2796 - DNA, 10 bp, Artificial Sequence
  Synthetic Polynucleotide
tccatcagca

SEQ ID NO: 2797 - DNA, 10 bp, Artificial Sequence
  Synthetic Polynucleotide
acccacgtca

SEQ ID NO: 2798 - DNA, 10 bp, Artificial Sequence
  Synthetic Polynucleotide
caacacgaga

SEQ ID NO: 2799 - DNA, 10 bp, Artificial Sequence
  Synthetic Polynucleotide
tgtgatgcag

SEQ ID NO: 2800 - DNA, 10 bp, Artificial Sequence
  Synthetic Polynucleotide
ccaccctccc

SEQ ID NO: 2801 - DNA, 10 bp, Artificial Sequence
  Synthetic Polynucleotide
ggtgacatcg

SEQ ID NO: 2802 - DNA, 10 bp, Artificial Sequence
  Synthetic Polynucleotide
cacgcttaca

SEQ ID NO: 2803 - DNA, 10 bp, Artificial Sequence
  Synthetic Polynucleotide
tcagacggtg

SEQ ID NO: 2804 - DNA, 10 bp, Artificial Sequence
  Synthetic Polynucleotide
ccacatgctc

SEQ ID NO: 2805 - DNA, 10 bp, Artificial Sequence
  Synthetic Polynucleotide
gtgactccct

SEQ ID NO: 2806 - DNA, 10 bp, Artificial Sequence
  Synthetic Polynucleotide
gtccttgggc

SEQ ID NO: 2807 - DNA, 10 bp, Artificial Sequence
  Synthetic Polynucleotide
tggcttacca

SEQ ID NO: 2808 - DNA, 10 bp, Artificial Sequence
  Synthetic Polynucleotide
ctgccatctg

SEQ ID NO: 2809 - DNA, 10 bp, Artificial Sequence
  Synthetic Polynucleotide
ggggattggg

SEQ ID NO: 2810 - DNA, 10 bp, Artificial Sequence
  Synthetic Polynucleotide
tcctctgtca

SEQ ID NO: 2811 - DNA, 10 bp, Artificial Sequence
  Synthetic Polynucleotide
tggggaaaga

SEQ ID NO: 2812 - DNA, 10 bp, Artificial Sequence
  Synthetic Polynucleotide
gtggtccctg

SEQ ID NO: 2813 - DNA, 10 bp, Artificial Sequence
  Synthetic Polynucleotide
tccttgggag

SEQ ID NO: 2814 - DNA, 10 bp, Artificial Sequence
  Synthetic Polynucleotide
ctgcttgccc

SEQ ID NO: 2815 - DNA, 10 bp, Artificial Sequence
  Synthetic Polynucleotide
gcgagagcgt

SEQ ID NO: 2816 - DNA, 10 bp, Artificial Sequence
  Synthetic Polynucleotide
ctgttcgggc

SEQ ID NO: 2817 - DNA, 10 bp, Artificial Sequence
  Synthetic Polynucleotide
gcttgcttgc

SEQ ID NO: 2818 - DNA, 10 bp, Artificial Sequence
  Synthetic Polynucleotide
tggggtcaaa

SEQ ID NO: 2819 - DNA, 10 bp, Artificial Sequence
  Synthetic Polynucleotide
ctcgtccggg

SEQ ID NO: 2820 - DNA, 10 bp, Artificial Sequence
  Synthetic Polynucleotide
atgacggctt

SEQ ID NO: 2821 - DNA, 10 bp, Artificial Sequence
  Synthetic Polynucleotide
gcgtggcgat

SEQ ID NO: 2822 - DNA, 10 bp, Artificial Sequence
  Synthetic Polynucleotide
ccatttgcca

SEQ ID NO: 2823 - DNA, 10 bp, Artificial Sequence
  Synthetic Polynucleotide
ggggatgtca

SEQ ID NO: 2824 - DNA, 10 bp, Artificial Sequence
  Synthetic Polynucleotide
cccttgtggt

SEQ ID NO: 2825 - DNA, 10 bp, Artificial Sequence
  Synthetic Polynucleotide
tgtcaggaca

SEQ ID NO: 2826 - DNA, 10 bp, Artificial Sequence
  Synthetic Polynucleotide
ccaggttgta

SEQ ID NO: 2827 - DNA, 10 bp, Artificial Sequence
  Synthetic Polynucleotide
atcagtggcc

SEQ ID NO: 2828 - DNA, 10 bp, Artificial Sequence
  Synthetic Polynucleotide
agccactccc

SEQ ID NO: 2829 - DNA, 10 bp, Artificial Sequence
  Synthetic Polynucleotide
agggaggact

SEQ ID NO: 2830 - DNA, 10 bp, Artificial Sequence
  Synthetic Polynucleotide
ggccattgtt

SEQ ID NO: 2831 - DNA, 10 bp, Artificial Sequence
  Synthetic Polynucleotide
acaggagcag

SEQ ID NO: 2832 - DNA, 10 bp, Artificial Sequence
  Synthetic Polynucleotide
tgtccaggca

SEQ ID NO: 2833 - DNA, 10 bp, Artificial Sequence
  Synthetic Polynucleotide
ctggaccctc

SEQ ID NO: 2834 - DNA, 10 bp, Artificial Sequence
  Synthetic Polynucleotide
gatcaggccc

SEQ ID NO: 2835 - DNA, 10 bp, Artificial Sequence
  Synthetic Polynucleotide
aaatcagccg

SEQ ID NO: 2836 - DNA, 10 bp, Artificial Sequence
  Synthetic Polynucleotide
tctgtctggt

SEQ ID NO: 2837 - DNA, 10 bp, Artificial Sequence
  Synthetic Polynucleotide
tcctcggaaa

SEQ ID NO: 2838 - DNA, 10 bp, Artificial Sequence
  Synthetic Polynucleotide
ttgtgcccaa

SEQ ID NO: 2839 - DNA, 10 bp, Artificial Sequence
  Synthetic Polynucleotide
tggaccagga

SEQ ID NO: 2840 - DNA, 10 bp, Artificial Sequence
  Synthetic Polynucleotide
ccccagagtc

SEQ ID NO: 2841 - DNA, 10 bp, Artificial Sequence
  Synthetic Polynucleotide
agaagcagcc

SEQ ID NO: 2842 - DNA, 10 bp, Artificial Sequence
  Synthetic Polynucleotide
gccccacgtt

SEQ ID NO: 2843 - DNA, 10 bp, Artificial Sequence
  Synthetic Polynucleotide
tcgagaacca

SEQ ID NO: 2844 - DNA, 10 bp, Artificial Sequence
  Synthetic Polynucleotide
tcccttccac

SEQ ID NO: 2845 - DNA, 10 bp, Artificial Sequence
  Synthetic Polynucleotide
gcatgttggt

SEQ ID NO: 2846 - DNA, 10 bp, Artificial Sequence
  Synthetic Polynucleotide
accctgttgg

SEQ ID NO: 2847 - DNA, 10 bp, Artificial Sequence
  Synthetic Polynucleotide
agggacttga

SEQ ID NO: 2848 - DNA, 10 bp, Artificial Sequence
  Synthetic Polynucleotide
ggacgagccc

SEQ ID NO: 2849 - DNA, 10 bp, Artificial Sequence
  Synthetic Polynucleotide
tcgtggtctc

SEQ ID NO: 2850 - DNA, 10 bp, Artificial Sequence
  Synthetic Polynucleotide
attggggagc

SEQ ID NO: 2851 - DNA, 10 bp, Artificial Sequence
  Synthetic Polynucleotide
aacccctcct

SEQ ID NO: 2852 - DNA, 10 bp, Artificial Sequence
  Synthetic Polynucleotide
gtctctgggt

SEQ ID NO: 2853 - DNA, 10 bp, Artificial Sequence
  Synthetic Polynucleotide
ccagaccctg

SEQ ID NO: 2854 - DNA, 10 bp, Artificial Sequence
  Synthetic Polynucleotide
ttggtccagc

SEQ ID NO: 2855 - DNA, 10 bp, Artificial Sequence
  Synthetic Polynucleotide
gacattgggg

SEQ ID NO: 2856 - DNA, 10 bp, Artificial Sequence
  Synthetic Polynucleotide
ccaccattcc

SEQ ID NO: 2857 - DNA, 10 bp, Artificial Sequence
  Synthetic Polynucleotide
ccattgtggc

SEQ ID NO: 2858 - DNA, 10 bp, Artificial Sequence
  Synthetic Polynucleotide
gctcagttcc

SEQ ID NO: 2859 - DNA, 10 bp, Artificial Sequence
  Synthetic Polynucleotide
gtgtagccct

SEQ ID NO: 2860 - DNA, 10 bp, Artificial Sequence
  Synthetic Polynucleotide
gggtccctgc

SEQ ID NO: 2861 - DNA, 10 bp, Artificial Sequence
  Synthetic Polynucleotide
tgcccaccag

SEQ ID NO: 2862 - DNA, 10 bp, Artificial Sequence
  Synthetic Polynucleotide
gactcctggt

SEQ ID NO: 2863 - DNA, 10 bp, Artificial Sequence
  Synthetic Polynucleotide
acttcctccc

SEQ ID NO: 2864 - DNA, 10 bp, Artificial Sequence
  Synthetic Polynucleotide
ggcgatcagt

SEQ ID NO: 2865 - DNA, 10 bp, Artificial Sequence
  Synthetic Polynucleotide
aggaaaggcc

SEQ ID NO: 2866 - DNA, 10 bp, Artificial Sequence
  Synthetic Polynucleotide
ctctctgcct

SEQ ID NO: 2867 - DNA, 10 bp, Artificial Sequence
  Synthetic Polynucleotide
caggcagcag

SEQ ID NO: 2868 - DNA, 10 bp, Artificial Sequence
  Synthetic Polynucleotide
cctagccagg

SEQ ID NO: 2869 - DNA, 10 bp, Artificial Sequence
  Synthetic Polynucleotide
atgcagggcc

SEQ ID NO: 2870 - DNA, 10 bp, Artificial Sequence
  Synthetic Polynucleotide
cccactgtgt

SEQ ID NO: 2871 - DNA, 10 bp, Artificial Sequence
  Synthetic Polynucleotide
ggctttcagc

SEQ ID NO: 2872 - DNA, 10 bp, Artificial Sequence
  Synthetic Polynucleotide
tccagtgaga

SEQ ID NO: 2873 - DNA, 10 bp, Artificial Sequence
  Synthetic Polynucleotide
aggcacttca

SEQ ID NO: 2874 - DNA, 10 bp, Artificial Sequence
  Synthetic Polynucleotide
ccccagaagt

SEQ ID NO: 2875 - DNA, 10 bp, Artificial Sequence
  Synthetic Polynucleotide
caaggccgat

SEQ ID NO: 2876 - DNA, 10 bp, Artificial Sequence
  Synthetic Polynucleotide
atgcaggtga

SEQ ID NO: 2877 - DNA, 10 bp, Artificial Sequence
  Synthetic Polynucleotide
gggacaggaa

SEQ ID NO: 2878 - DNA, 10 bp, Artificial Sequence
  Synthetic Polynucleotide
ggcttctccc

SEQ ID NO: 2879 - DNA, 10 bp, Artificial Sequence
  Synthetic Polynucleotide
ggcagttgag

SEQ ID NO: 2880 - DNA, 10 bp, Artificial Sequence
  Synthetic Polynucleotide
tcccctccag

SEQ ID NO: 2881 - DNA, 10 bp, Artificial Sequence
  Synthetic Polynucleotide
tgaccgagat

SEQ ID NO: 2882 - DNA, 10 bp, Artificial Sequence
  Synthetic Polynucleotide
tggtggtctt

SEQ ID NO: 2883 - DNA, 10 bp, Artificial Sequence
  Synthetic Polynucleotide
tggaagacga

SEQ ID NO: 2884 - DNA, 10 bp, Artificial Sequence
  Synthetic Polynucleotide
atcctcccct

SEQ ID NO: 2885 - DNA, 10 bp, Artificial Sequence
  Synthetic Polynucleotide
aattgcagcc

SEQ ID NO: 2886 - DNA, 10 bp, Artificial Sequence
  Synthetic Polynucleotide
tcaatccccg

SEQ ID NO: 2887 - DNA, 10 bp, Artificial Sequence
  Synthetic Polynucleotide
catccgaggt

SEQ ID NO: 2888 - DNA, 10 bp, Artificial Sequence
  Synthetic Polynucleotide
attcagccca

SEQ ID NO: 2889 - DNA, 10 bp, Artificial Sequence
  Synthetic Polynucleotide
agtggcggaa

SEQ ID NO: 2890 - DNA, 10 bp, Artificial Sequence
  Synthetic Polynucleotide
taagggtcca

SEQ ID NO: 2891 - DNA, 10 bp, Artificial Sequence
  Synthetic Polynucleotide
gcatctgagc

SEQ ID NO: 2892 - DNA, 10 bp, Artificial Sequence
  Synthetic Polynucleotide
cgtcctgtgc

SEQ ID NO: 2893 - DNA, 10 bp, Artificial Sequence
  Synthetic Polynucleotide
gcaggcagca

SEQ ID NO: 2894 - DNA, 10 bp, Artificial Sequence
  Synthetic Polynucleotide
cgtcaacccc

SEQ ID NO: 2895 - DNA, 10 bp, Artificial Sequence
  Synthetic Polynucleotide
cggtgcatac

SEQ ID NO: 2896 - DNA, 10 bp, Artificial Sequence
  Synthetic Polynucleotide
accagctcca

SEQ ID NO: 2897 - DNA, 10 bp, Artificial Sequence
  Synthetic Polynucleotide
ccggttgata

SEQ ID NO: 2898 - DNA, 10 bp, Artificial Sequence
  Synthetic Polynucleotide
gccaagactc

SEQ ID NO: 2899 - DNA, 10 bp, Artificial Sequence
  Synthetic Polynucleotide
aagcacgggt

SEQ ID NO: 2900 - DNA, 10 bp, Artificial Sequence
  Synthetic Polynucleotide
gtgccagcat

SEQ ID NO: 2901 - DNA, 10 bp, Artificial Sequence
  Synthetic Polynucleotide
agtagcgtgt

SEQ ID NO: 2902 - DNA, 10 bp, Artificial Sequence
  Synthetic Polynucleotide
ggcgttccaa

SEQ ID NO: 2903 - DNA, 10 bp, Artificial Sequence
  Synthetic Polynucleotide
aggtggttgc

SEQ ID NO: 2904 - DNA, 10 bp, Artificial Sequence
  Synthetic Polynucleotide
agcccaatgc

SEQ ID NO: 2905 - DNA, 10 bp, Artificial Sequence
  Synthetic Polynucleotide
atgagtggga

SEQ ID NO: 2906 - DNA, 10 bp, Artificial Sequence
  Synthetic Polynucleotide
tcgttgcttg

SEQ ID NO: 2907 - DNA, 10 bp, Artificial Sequence
  Synthetic Polynucleotide
gcgacgaaaa

SEQ ID NO: 2908 - DNA, 10 bp, Artificial Sequence
  Synthetic Polynucleotide
tgccgtcttt

SEQ ID NO: 2909 - DNA, 10 bp, Artificial Sequence
  Synthetic Polynucleotide
aacgccacca

SEQ ID NO: 2910 - DNA, 10 bp, Artificial Sequence
  Synthetic Polynucleotide
ccttgccgtc

SEQ ID NO: 2911 - DNA, 10 bp, Artificial Sequence
  Synthetic Polynucleotide
ccaccgacga

SEQ ID NO: 2912 - DNA, 10 bp, Artificial Sequence
  Synthetic Polynucleotide
ccgtcctcca

SEQ ID NO: 2913 - DNA, 10 bp, Artificial Sequence
  Synthetic Polynucleotide
aaaaccgcag

SEQ ID NO: 2914 - DNA, 10 bp, Artificial Sequence
  Synthetic Polynucleotide
gtcctcgaac

SEQ ID NO: 2915 - DNA, 10 bp, Artificial Sequence
  Synthetic Polynucleotide
gaaggtgctg

SEQ ID NO: 2916 - DNA, 10 bp, Artificial Sequence
  Synthetic Polynucleotide
cagcagcagc

SEQ ID NO: 2917 - DNA, 10 bp, Artificial Sequence
  Synthetic Polynucleotide
gacgacgacg

SEQ ID NO: 2918 - DNA, 10 bp, Artificial Sequence
  Synthetic Polynucleotide
acaatcgcta

SEQ ID NO: 2919 - DNA, 10 bp, Artificial Sequence
  Synthetic Polynucleotide
cacgaaagga

SEQ ID NO: 2920 - DNA, 10 bp, Artificial Sequence
  Synthetic Polynucleotide
gccgttgccg

SEQ ID NO: 2921 - DNA, 10 bp, Artificial Sequence
  Synthetic Polynucleotide
cgaccccgac

SEQ ID NO: 2922 - DNA, 10 bp, Artificial Sequence
  Synthetic Polynucleotide
catttcgcca

SEQ ID NO: 2923 - DNA, 10 bp, Artificial Sequence
  Synthetic Polynucleotide
tgaagaagcg

SEQ ID NO: 2924 - DNA, 10 bp, Artificial Sequence
  Synthetic Polynucleotide
gccgccgttg

SEQ ID NO: 2925 - DNA, 10 bp, Artificial Sequence
  Synthetic Polynucleotide
ccctcgccat

SEQ ID NO: 2926 - DNA, 10 bp, Artificial Sequence
  Synthetic Polynucleotide
caccaccaga

SEQ ID NO: 2927 - DNA, 10 bp, Artificial Sequence
  Synthetic Polynucleotide
atgccagcaa

SEQ ID NO: 2928 - DNA, 10 bp, Artificial Sequence
  Synthetic Polynucleotide
ctggtcggcg

SEQ ID NO: 2929 - DNA, 10 bp, Artificial Sequence
  Synthetic Polynucleotide
gatcgaggca

SEQ ID NO: 2930 - DNA, 10 bp, Artificial Sequence
  Synthetic Polynucleotide
gctcgtcagc

SEQ ID NO: 2931 - DNA, 10 bp, Artificial Sequence
  Synthetic Polynucleotide
gcggctcgct

SEQ ID NO: 2932 - DNA, 10 bp, Artificial Sequence
  Synthetic Polynucleotide
cgccattcgt

SEQ ID NO: 2933 - DNA, 10 bp, Artificial Sequence
  Synthetic Polynucleotide
aaagacgctg

SEQ ID NO: 2934 - DNA, 10 bp, Artificial Sequence
  Synthetic Polynucleotide
gtttcggcat

SEQ ID NO: 2935 - DNA, 10 bp, Artificial Sequence
  Synthetic Polynucleotide
aacgcaaaga

SEQ ID NO: 2936 - DNA, 10 bp, Artificial Sequence
  Synthetic Polynucleotide
aagccactga

SEQ ID NO: 2937 - DNA, 10 bp, Artificial Sequence
  Synthetic Polynucleotide
ggtgaaggtg

SEQ ID NO: 2938 - DNA, 10 bp, Artificial Sequence
  Synthetic Polynucleotide
ttcctgccat

SEQ ID NO: 2939 - DNA, 10 bp, Artificial Sequence
  Synthetic Polynucleotide
aagacggcaa

SEQ ID NO: 2940 - DNA, 10 bp, Artificial Sequence
  Synthetic Polynucleotide
cgcttcttca

SEQ ID NO: 2941 - DNA, 10 bp, Artificial Sequence
  Synthetic Polynucleotide
acgccctaaa

SEQ ID NO: 2942 - DNA, 10 bp, Artificial Sequence
  Synthetic Polynucleotide
caccaccgcc

SEQ ID NO: 2943 - DNA, 10 bp, Artificial Sequence
  Synthetic Polynucleotide
ggcaacggtg

SEQ ID NO: 2944 - DNA, 10 bp, Artificial Sequence
  Synthetic Polynucleotide
atcgtcgagt

SEQ ID NO: 2945 - DNA, 10 bp, Artificial Sequence
  Synthetic Polynucleotide
caggcccagc

SEQ ID NO: 2946 - DNA, 10 bp, Artificial Sequence
  Synthetic Polynucleotide
gcgccccagt

SEQ ID NO: 2947 - DNA, 10 bp, Artificial Sequence
  Synthetic Polynucleotide
ggggcgtttt

SEQ ID NO: 2948 - DNA, 10 bp, Artificial Sequence
  Synthetic Polynucleotide
tcaatgcgtt

SEQ ID NO: 2949 - DNA, 10 bp, Artificial Sequence
  Synthetic Polynucleotide
cgaaagcagc

SEQ ID NO: 2950 - DNA, 10 bp, Artificial Sequence
  Synthetic Polynucleotide
cgccagcagg

SEQ ID NO: 2951 - DNA, 10 bp, Artificial Sequence
  Synthetic Polynucleotide
acaagaccga

SEQ ID NO: 2952 - DNA, 10 bp, Artificial Sequence
  Synthetic Polynucleotide
tcaagctgtc

SEQ ID NO: 2953 - DNA, 10 bp, Artificial Sequence
  Synthetic Polynucleotide
gcagacgaac

SEQ ID NO: 2954 - DNA, 10 bp, Artificial Sequence
  Synthetic Polynucleotide
catcgttgcc

SEQ ID NO: 2955 - DNA, 10 bp, Artificial Sequence
  Synthetic Polynucleotide
accacaacca

SEQ ID NO: 2956 - DNA, 10 bp, Artificial Sequence
  Synthetic Polynucleotide
tcctgttcct

SEQ ID NO: 2957 - DNA, 10 bp, Artificial Sequence
  Synthetic Polynucleotide
aaaggagcga

SEQ ID NO: 2958 - DNA, 10 bp, Artificial Sequence
  Synthetic Polynucleotide
gcaaggcaat

SEQ ID NO: 2959 - DNA, 10 bp, Artificial Sequence
  Synthetic Polynucleotide
cgccaaactg

SEQ ID NO: 2960 - DNA, 10 bp, Artificial Sequence
  Synthetic Polynucleotide
cagttgcaga

SEQ ID NO: 2961 - DNA, 10 bp, Artificial Sequence
  Synthetic Polynucleotide
gtccaaccgc

SEQ ID NO: 2962 - DNA, 10 bp, Artificial Sequence
  Synthetic Polynucleotide
catggcacaa

SEQ ID NO: 2963 - DNA, 10 bp, Artificial Sequence
  Synthetic Polynucleotide
tgcttcgagt

SEQ ID NO: 2964 - DNA, 10 bp, Artificial Sequence
  Synthetic Polynucleotide
gctcaaagcc

SEQ ID NO: 2965 - DNA, 10 bp, Artificial Sequence
  Synthetic Polynucleotide
accgtaccat

SEQ ID NO: 2966 - DNA, 10 bp, Artificial Sequence
  Synthetic Polynucleotide
tggctctgat

SEQ ID NO: 2967 - DNA, 10 bp, Artificial Sequence
  Synthetic Polynucleotide
aaagctcgtg

SEQ ID NO: 2968 - DNA, 10 bp, Artificial Sequence
  Synthetic Polynucleotide
tgtacctgct

SEQ ID NO: 2969 - DNA, 10 bp, Artificial Sequence
  Synthetic Polynucleotide
actctcgctt

SEQ ID NO: 2970 - DNA, 10 bp, Artificial Sequence
  Synthetic Polynucleotide
aacgcaaaga

SEQ ID NO: 2971 - DNA, 10 bp, Artificial Sequence
  Synthetic Polynucleotide
atctccgcca

SEQ ID NO: 2972 - DNA, 10 bp, Artificial Sequence
  Synthetic Polynucleotide
gctaaggctg

SEQ ID NO: 2973 - DNA, 10 bp, Artificial Sequence
  Synthetic Polynucleotide
ccctttcgta

SEQ ID NO: 2974 - DNA, 10 bp, Artificial Sequence
  Synthetic Polynucleotide
ttgttgtgca

SEQ ID NO: 2975 - DNA, 10 bp, Artificial Sequence
  Synthetic Polynucleotide
ctttgcaggt

SEQ ID NO: 2976 - DNA, 10 bp, Artificial Sequence
  Synthetic Polynucleotide
aagtggtgga

SEQ ID NO: 2977 - DNA, 10 bp, Artificial Sequence
  Synthetic Polynucleotide
ggcttcgggg

SEQ ID NO: 2978 - DNA, 10 bp, Artificial Sequence
  Synthetic Polynucleotide
acgcaggagg

SEQ ID NO: 2979 - DNA, 10 bp, Artificial Sequence
  Synthetic Polynucleotide
gcatgttggc

SEQ ID NO: 2980 - DNA, 10 bp, Artificial Sequence
  Synthetic Polynucleotide
tccgcatccg

SEQ ID NO: 2981 - DNA, 10 bp, Artificial Sequence
  Synthetic Polynucleotide
cacgcagtta

SEQ ID NO: 2982 - DNA, 10 bp, Artificial Sequence
  Synthetic Polynucleotide
cagccagccg

SEQ ID NO: 2983 - DNA, 10 bp, Artificial Sequence
  Synthetic Polynucleotide
tcttgtgggc

SEQ ID NO: 2984 - DNA, 10 bp, Artificial Sequence
  Synthetic Polynucleotide
ggcactccgc

SEQ ID NO: 2985 - DNA, 10 bp, Artificial Sequence
  Synthetic Polynucleotide
ttgagcccaa

SEQ ID NO: 2986 - DNA, 10 bp, Artificial Sequence
  Synthetic Polynucleotide
ggggagaggg

SEQ ID NO: 2987 - DNA, 10 bp, Artificial Sequence
  Synthetic Polynucleotide
aaagcagccg

SEQ ID NO: 2988 - DNA, 10 bp, Artificial Sequence
  Synthetic Polynucleotide
ctgtccacca

SEQ ID NO: 2989 - DNA, 10 bp, Artificial Sequence
  Synthetic Polynucleotide
cgttgcagtt

SEQ ID NO: 2990 - DNA, 10 bp, Artificial Sequence
  Synthetic Polynucleotide
tacccgaaac

SEQ ID NO: 2991 - DNA, 10 bp, Artificial Sequence
  Synthetic Polynucleotide
gggttttcgt

SEQ ID NO: 2992 - DNA, 10 bp, Artificial Sequence
  Synthetic Polynucleotide
actgccaaga

SEQ ID NO: 2993 - DNA, 10 bp, Artificial Sequence
  Synthetic Polynucleotide
tggtgccagt

SEQ ID NO: 2994 - DNA, 10 bp, Artificial Sequence
  Synthetic Polynucleotide
caccaccacc

SEQ ID NO: 2995 - DNA, 10 bp, Artificial Sequence
  Synthetic Polynucleotide
cgttgtcgtc

SEQ ID NO: 2996 - DNA, 10 bp, Artificial Sequence
  Synthetic Polynucleotide
gaaacggaca

SEQ ID NO: 2997 - DNA, 10 bp, Artificial Sequence
  Synthetic Polynucleotide
tgtcccagtg

SEQ ID NO: 2998 - DNA, 10 bp, Artificial Sequence
  Synthetic Polynucleotide
tcatgacagc

SEQ ID NO: 2999 - DNA, 10 bp, Artificial Sequence
  Synthetic Polynucleotide
agtgttcggc

SEQ ID NO: 3000 - DNA, 10 bp, Artificial Sequence
  Synthetic Polynucleotide
cgcgacgtta

SEQ ID NO: 3001 - DNA, 10 bp, Artificial Sequence
  Synthetic Polynucleotide
tgcagttcct

SEQ ID NO: 3002 - DNA, 10 bp, Artificial Sequence
  Synthetic Polynucleotide
agcaggtacc

SEQ ID NO: 3003 - DNA, 10 bp, Artificial Sequence
  Synthetic Polynucleotide
gtcgttcggc

SEQ ID NO: 3004 - DNA, 10 bp, Artificial Sequence
  Synthetic Polynucleotide
cttgttccgc

SEQ ID NO: 3005 - DNA, 10 bp, Artificial Sequence
  Synthetic Polynucleotide
gggaggtcct

SEQ ID NO: 3006 - DNA, 10 bp, Artificial Sequence
  Synthetic Polynucleotide
tagggaggcc

SEQ ID NO: 3007 - DNA, 10 bp, Artificial Sequence
  Synthetic Polynucleotide
tcttctccgc

SEQ ID NO: 3008 - DNA, 10 bp, Artificial Sequence
  Synthetic Polynucleotide
aggggtgcct

SEQ ID NO: 3009 - DNA, 10 bp, Artificial Sequence
  Synthetic Polynucleotide
cgctgtttct

SEQ ID NO: 3010 - DNA, 10 bp, Artificial Sequence
  Synthetic Polynucleotide
tactcacgac

SEQ ID NO: 3011 - DNA, 10 bp, Artificial Sequence
  Synthetic Polynucleotide
tctggggagg

SEQ ID NO: 3012 - DNA, 10 bp, Artificial Sequence
  Synthetic Polynucleotide
tctccgcctt

SEQ ID NO: 3013 - DNA, 10 bp, Artificial Sequence
  Synthetic Polynucleotide
caggaagcgc

SEQ ID NO: 3014 - DNA, 10 bp, Artificial Sequence
  Synthetic Polynucleotide
gttgctgggg

SEQ ID NO: 3015 - DNA, 10 bp, Artificial Sequence
  Synthetic Polynucleotide
cgcgtgtcac

SEQ ID NO: 3016 - DNA, 10 bp, Artificial Sequence
  Synthetic Polynucleotide
tccgggatgc

SEQ ID NO: 3017 - DNA, 10 bp, Artificial Sequence
  Synthetic Polynucleotide
caccacacca

SEQ ID NO: 3018 - DNA, 10 bp, Artificial Sequence
  Synthetic Polynucleotide
gcgatacctc

SEQ ID NO: 3019 - DNA, 10 bp, Artificial Sequence
  Synthetic Polynucleotide
gcaggatgga

SEQ ID NO: 3020 - DNA, 10 bp, Artificial Sequence
  Synthetic Polynucleotide
gaaacgtgct

SEQ ID NO: 3021 - DNA, 10 bp, Artificial Sequence
  Synthetic Polynucleotide
aagggcagga

SEQ ID NO: 3022 - DNA, 10 bp, Artificial Sequence
  Synthetic Polynucleotide
ccaccattgg

SEQ ID NO: 3023 - DNA, 10 bp, Artificial Sequence
  Synthetic Polynucleotide
ccttggctgt

SEQ ID NO: 3024 - DNA, 10 bp, Artificial Sequence
  Synthetic Polynucleotide
agcgaactgt

SEQ ID NO: 3025 - DNA, 10 bp, Artificial Sequence
  Synthetic Polynucleotide
tccttctgga

SEQ ID NO: 3026 - DNA, 10 bp, Artificial Sequence
  Synthetic Polynucleotide
gccaaaccgt

SEQ ID NO: 3027 - DNA, 10 bp, Artificial Sequence
  Synthetic Polynucleotide
atccaaccca

SEQ ID NO: 3028 - DNA, 10 bp, Artificial Sequence
  Synthetic Polynucleotide
cgattgtgga

SEQ ID NO: 3029 - DNA, 10 bp, Artificial Sequence
  Synthetic Polynucleotide
cccgacccgg

SEQ ID NO: 3030 - DNA, 10 bp, Artificial Sequence
  Synthetic Polynucleotide
ttgcgttcca

SEQ ID NO: 3031 - DNA, 10 bp, Artificial Sequence
  Synthetic Polynucleotide
ggagatggcg

SEQ ID NO: 3032 - DNA, 10 bp, Artificial Sequence
  Synthetic Polynucleotide
cccaggggat

SEQ ID NO: 3033 - DNA, 10 bp, Artificial Sequence
  Synthetic Polynucleotide
gactctgggg

SEQ ID NO: 3034 - DNA, 10 bp, Artificial Sequence
  Synthetic Polynucleotide
atttgccgtg

SEQ ID NO: 3035 - DNA, 10 bp, Artificial Sequence
  Synthetic Polynucleotide
tcaactcgtc

SEQ ID NO: 3036 - DNA, 10 bp, Artificial Sequence
  Synthetic Polynucleotide
tggagaaccg

SEQ ID NO: 3037 - DNA, 10 bp, Artificial Sequence
  Synthetic Polynucleotide
cacgagcacg

SEQ ID NO: 3038 - DNA, 10 bp, Artificial Sequence
  Synthetic Polynucleotide
cgggtcgtct

SEQ ID NO: 3039 - DNA, 10 bp, Artificial Sequence
  Synthetic Polynucleotide
tcgctctaca

SEQ ID NO: 3040 - DNA, 10 bp, Artificial Sequence
  Synthetic Polynucleotide
tggaggcggg

SEQ ID NO: 3041 - DNA, 10 bp, Artificial Sequence
  Synthetic Polynucleotide
ttcaccgacg

SEQ ID NO: 3042 - DNA, 10 bp, Artificial Sequence
  Synthetic Polynucleotide
gtaggcgttg

SEQ ID NO: 3043 - DNA, 10 bp, Artificial Sequence
  Synthetic Polynucleotide
cgggattccg

SEQ ID NO: 3044 - DNA, 10 bp, Artificial Sequence
  Synthetic Polynucleotide
atcgctggca

SEQ ID NO: 3045 - DNA, 10 bp, Artificial Sequence
  Synthetic Polynucleotide
cagccaatga

SEQ ID NO: 3046 - DNA, 10 bp, Artificial Sequence
  Synthetic Polynucleotide
agaccgttgg

SEQ ID NO: 3047 - DNA, 10 bp, Artificial Sequence
  Synthetic Polynucleotide
gcggccttga

SEQ ID NO: 3048 - DNA, 10 bp, Artificial Sequence
  Synthetic Polynucleotide
gtagtggcgt

SEQ ID NO: 3049 - DNA, 10 bp, Artificial Sequence
  Synthetic Polynucleotide
gtcactggcg

SEQ ID NO: 3050 - DNA, 10 bp, Artificial Sequence
  Synthetic Polynucleotide
gctgcatcga

SEQ ID NO: 3051 - DNA, 10 bp, Artificial Sequence
  Synthetic Polynucleotide
caacacacca

SEQ ID NO: 3052 - DNA, 10 bp, Artificial Sequence
  Synthetic Polynucleotide
ctctgcttcg

SEQ ID NO: 3053 - DNA, 10 bp, Artificial Sequence
  Synthetic Polynucleotide
gtggaagggg

SEQ ID NO: 3054 - DNA, 10 bp, Artificial Sequence
  Synthetic Polynucleotide
ggtcgtacca

SEQ ID NO: 3055 - DNA, 10 bp, Artificial Sequence
  Synthetic Polynucleotide
aaggtgggca

SEQ ID NO: 3056 - DNA, 10 bp, Artificial Sequence
  Synthetic Polynucleotide
tctgtttgca

SEQ ID NO: 3057 - DNA, 10 bp, Artificial Sequence
  Synthetic Polynucleotide
atacgaccca

SEQ ID NO: 3058 - DNA, 10 bp, Artificial Sequence
  Synthetic Polynucleotide
actgtggccc

SEQ ID NO: 3059 - DNA, 10 bp, Artificial Sequence
  Synthetic Polynucleotide
cgaggaccgg

SEQ ID NO: 3060 - DNA, 10 bp, Artificial Sequence
  Synthetic Polynucleotide
ttggacccta

SEQ ID NO: 3061 - DNA, 10 bp, Artificial Sequence
  Synthetic Polynucleotide
tcgtcaacgt

SEQ ID NO: 3062 - DNA, 10 bp, Artificial Sequence
  Synthetic Polynucleotide
ccacattccc

SEQ ID NO: 3063 - DNA, 10 bp, Artificial Sequence
  Synthetic Polynucleotide
atccagagca

SEQ ID NO: 3064 - DNA, 10 bp, Artificial Sequence
  Synthetic Polynucleotide
tcttgacggg

SEQ ID NO: 3065 - DNA, 10 bp, Artificial Sequence
  Synthetic Polynucleotide
cagactggcg

SEQ ID NO: 3066 - DNA, 10 bp, Artificial Sequence
  Synthetic Polynucleotide
gcgaaaaggg

SEQ ID NO: 3067 - DNA, 10 bp, Artificial Sequence
  Synthetic Polynucleotide
gacgacaaca

SEQ ID NO: 3068 - DNA, 10 bp, Artificial Sequence
  Synthetic Polynucleotide
gagagctggg

SEQ ID NO: 3069 - DNA, 10 bp, Artificial Sequence
  Synthetic Polynucleotide
cttcctcccc

SEQ ID NO: 3070 - DNA, 10 bp, Artificial Sequence
  Synthetic Polynucleotide
tgaagaggga

SEQ ID NO: 3071 - DNA, 10 bp, Artificial Sequence
  Synthetic Polynucleotide
ctccctccaa

SEQ ID NO: 3072 - DNA, 10 bp, Artificial Sequence
  Synthetic Polynucleotide
gtgtggcgat

SEQ ID NO: 3073 - DNA, 10 bp, Artificial Sequence
  Synthetic Polynucleotide
gcccaacaac

SEQ ID NO: 3074 - DNA, 10 bp, Artificial Sequence
  Synthetic Polynucleotide
gaaactgaca

SEQ ID NO: 3075 - DNA, 10 bp, Artificial Sequence
  Synthetic Polynucleotide
ttttgatgcg

SEQ ID NO: 3076 - DNA, 10 bp, Artificial Sequence
  Synthetic Polynucleotide
actcaagagt

SEQ ID NO: 3077 - DNA, 10 bp, Artificial Sequence
  Synthetic Polynucleotide
catcatcaat

SEQ ID NO: 3078 - DNA, 10 bp, Artificial Sequence
  Synthetic Polynucleotide
tgttttcatg

SEQ ID NO: 3079 - DNA, 10 bp, Artificial Sequence
  Synthetic Polynucleotide
attgaaacac

SEQ ID NO: 3080 - DNA, 10 bp, Artificial Sequence
  Synthetic Polynucleotide
gccagttagc

SEQ ID NO: 3081 - DNA, 10 bp, Artificial Sequence
  Synthetic Polynucleotide
aaggactggt

SEQ ID NO: 3082 - DNA, 10 bp, Artificial Sequence
  Synthetic Polynucleotide
ttccaaattt

SEQ ID NO: 3083 - DNA, 10 bp, Artificial Sequence
  Synthetic Polynucleotide
gattccaaat

SEQ ID NO: 3084 - DNA, 10 bp, Artificial Sequence
  Synthetic Polynucleotide
accaggaacc

SEQ ID NO: 3085 - DNA, 10 bp, Artificial Sequence
  Synthetic Polynucleotide
tagaaaggac

SEQ ID NO: 3086 - DNA, 10 bp, Artificial Sequence
  Synthetic Polynucleotide
ggggtaatac

SEQ ID NO: 3087 - DNA, 10 bp, Artificial Sequence
  Synthetic Polynucleotide
tatacccatt

SEQ ID NO: 3088 - DNA, 10 bp, Artificial Sequence
  Synthetic Polynucleotide
acagtggatc

SEQ ID NO: 3089 - DNA, 10 bp, Artificial Sequence
  Synthetic Polynucleotide
ccaaactgat

SEQ ID NO: 3090 - DNA, 10 bp, Artificial Sequence
  Synthetic Polynucleotide
aaccagcagc

SEQ ID NO: 3091 - DNA, 10 bp, Artificial Sequence
  Synthetic Polynucleotide
ggatcctagg

SEQ ID NO: 3092 - DNA, 10 bp, Artificial Sequence
  Synthetic Polynucleotide
ccaaattgat

SEQ ID NO: 3093 - DNA, 10 bp, Artificial Sequence
  Synthetic Polynucleotide
aacccttatg

SEQ ID NO: 3094 - DNA, 10 bp, Artificial Sequence
  Synthetic Polynucleotide
cttcaatgtc

SEQ ID NO: 3095 - DNA, 10 bp, Artificial Sequence
  Synthetic Polynucleotide
caaaccaaca

SEQ ID NO: 3096 - DNA, 10 bp, Artificial Sequence
  Synthetic Polynucleotide
atgatgttgt

SEQ ID NO: 3097 - DNA, 10 bp, Artificial Sequence
  Synthetic Polynucleotide
tttcatatgg

SEQ ID NO: 3098 - DNA, 10 bp, Artificial Sequence
  Synthetic Polynucleotide
gtgatgatca

SEQ ID NO: 3099 - DNA, 10 bp, Artificial Sequence
  Synthetic Polynucleotide
atctagattt

SEQ ID NO: 3100 - DNA, 10 bp, Artificial Sequence
  Synthetic Polynucleotide
ccaggtggat

SEQ ID NO: 3101 - DNA, 10 bp, Artificial Sequence
  Synthetic Polynucleotide
cacaaaactc

SEQ ID NO: 3102 - DNA, 10 bp, Artificial Sequence
  Synthetic Polynucleotide
ttgtaatcaa

SEQ ID NO: 3103 - DNA, 10 bp, Artificial Sequence
  Synthetic Polynucleotide
tctgatgcac

SEQ ID NO: 3104 - DNA, 10 bp, Artificial Sequence
  Synthetic Polynucleotide
aacaagatgc

SEQ ID NO: 3105 - DNA, 10 bp, Artificial Sequence
  Synthetic Polynucleotide
ccgtgaccca

SEQ ID NO: 3106 - DNA, 10 bp, Artificial Sequence
  Synthetic Polynucleotide
agtcctcttt

SEQ ID NO: 3107 - DNA, 10 bp, Artificial Sequence
  Synthetic Polynucleotide
ggtggactca

SEQ ID NO: 3108 - DNA, 10 bp, Artificial Sequence
  Synthetic Polynucleotide
aaaccagcaa

SEQ ID NO: 3109 - DNA, 10 bp, Artificial Sequence
  Synthetic Polynucleotide
tctccaaacc

SEQ ID NO: 3110 - DNA, 10 bp, Artificial Sequence
  Synthetic Polynucleotide
cttgacccgc

SEQ ID NO: 3111 - DNA, 10 bp, Artificial Sequence
  Synthetic Polynucleotide
agtcatcatc

SEQ ID NO: 3112 - DNA, 10 bp, Artificial Sequence
  Synthetic Polynucleotide
cagttgttgt

SEQ ID NO: 3113 - DNA, 10 bp, Artificial Sequence
  Synthetic Polynucleotide
ggcctgtgtg

SEQ ID NO: 3114 - DNA, 10 bp, Artificial Sequence
  Synthetic Polynucleotide
tgtgcctcaa

SEQ ID NO: 3115 - DNA, 10 bp, Artificial Sequence
  Synthetic Polynucleotide
gaagaagaag

SEQ ID NO: 3116 - DNA, 10 bp, Artificial Sequence
  Synthetic Polynucleotide
ggtgaacaaa

SEQ ID NO: 3117 - DNA, 10 bp, Artificial Sequence
  Synthetic Polynucleotide
caacttcatg

SEQ ID NO: 3118 - DNA, 10 bp, Artificial Sequence
  Synthetic Polynucleotide
acacaaagta

SEQ ID NO: 3119 - DNA, 10 bp, Artificial Sequence
  Synthetic Polynucleotide
tttgtagttt

SEQ ID NO: 3120 - DNA, 10 bp, Artificial Sequence
  Synthetic Polynucleotide
aagatgatga

SEQ ID NO: 3121 - DNA, 10 bp, Artificial Sequence
  Synthetic Polynucleotide
aggaagttgt

SEQ ID NO: 3122 - DNA, 10 bp, Artificial Sequence
  Synthetic Polynucleotide
agcgtggtag

SEQ ID NO: 3123 - DNA, 10 bp, Artificial Sequence
  Synthetic Polynucleotide
cccctccaaa

SEQ ID NO: 3124 - DNA, 10 bp, Artificial Sequence
  Synthetic Polynucleotide
ttttggcatg

SEQ ID NO: 3125 - DNA, 10 bp, Artificial Sequence
  Synthetic Polynucleotide
aataaaatta

SEQ ID NO: 3126 - DNA, 10 bp, Artificial Sequence
  Synthetic Polynucleotide
tgttgttgtt

SEQ ID NO: 3127 - DNA, 10 bp, Artificial Sequence
  Synthetic Polynucleotide
aaataaattt

SEQ ID NO: 3128 - DNA, 10 bp, Artificial Sequence
  Synthetic Polynucleotide
aataaatttt

SEQ ID NO: 3129 - DNA, 10 bp, Artificial Sequence
  Synthetic Polynucleotide
ttttctaaaa

SEQ ID NO: 3130 - DNA, 10 bp, Artificial Sequence
  Synthetic Polynucleotide
ttgttttatt

SEQ ID NO: 3131 - DNA, 10 bp, Artificial Sequence
  Synthetic Polynucleotide
tgacggacgt

SEQ ID NO: 3132 - DNA, 10 bp, Artificial Sequence
  Synthetic Polynucleotide
ttgttgttca

SEQ ID NO: 3133 - DNA, 10 bp, Artificial Sequence
  Synthetic Polynucleotide
aaaataaata

SEQ ID NO: 3134 - DNA, 10 bp, Artificial Sequence
  Synthetic Polynucleotide
caccgacaac

SEQ ID NO: 3135 - DNA, 10 bp, Artificial Sequence
  Synthetic Polynucleotide
atcttcctca

SEQ ID NO: 3136 - DNA, 10 bp, Artificial Sequence
  Synthetic Polynucleotide
gtcctggttt

SEQ ID NO: 3137 - DNA, 10 bp, Artificial Sequence
  Synthetic Polynucleotide
gtgatttggc

SEQ ID NO: 3138 - DNA, 10 bp, Artificial Sequence
  Synthetic Polynucleotide
tatacccatt

SEQ ID NO: 3139 - DNA, 10 bp, Artificial Sequence
  Synthetic Polynucleotide
ggttttgcct

SEQ ID NO: 3140 - DNA, 10 bp, Artificial Sequence
  Synthetic Polynucleotide
gcgtcccaga

SEQ ID NO: 3141 - DNA, 10 bp, Artificial Sequence
  Synthetic Polynucleotide
gcagcctgtg

SEQ ID NO: 3142 - DNA, 10 bp, Artificial Sequence
  Synthetic Polynucleotide
gatgtcatgg

SEQ ID NO: 3143 - DNA, 10 bp, Artificial Sequence
  Synthetic Polynucleotide
tgtcagcata

SEQ ID NO: 3144 - DNA, 10 bp, Artificial Sequence
  Synthetic Polynucleotide
gactactggt

SEQ ID NO: 3145 - DNA, 10 bp, Artificial Sequence
  Synthetic Polynucleotide
ttgatgccaa

SEQ ID NO: 3146 - DNA, 10 bp, Artificial Sequence
  Synthetic Polynucleotide
gcggtatgcc

SEQ ID NO: 3147 - DNA, 10 bp, Artificial Sequence
  Synthetic Polynucleotide
gtagcagggt

SEQ ID NO: 3148 - DNA, 10 bp, Artificial Sequence
  Synthetic Polynucleotide
agggaacatg

SEQ ID NO: 3149 - DNA, 10 bp, Artificial Sequence
  Synthetic Polynucleotide
ttattcctgc

SEQ ID NO: 3150 - DNA, 10 bp, Artificial Sequence
  Synthetic Polynucleotide
gagacagacc

SEQ ID NO: 3151 - DNA, 10 bp, Artificial Sequence
  Synthetic Polynucleotide
taggcatcta

SEQ ID NO: 3152 - DNA, 10 bp, Artificial Sequence
  Synthetic Polynucleotide
gtgctcagca

SEQ ID NO: 3153 - DNA, 10 bp, Artificial Sequence
  Synthetic Polynucleotide
tggtctcctt

SEQ ID NO: 3154 - DNA, 10 bp, Artificial Sequence
  Synthetic Polynucleotide
tcttcggaag

SEQ ID NO: 3155 - DNA, 10 bp, Artificial Sequence
  Synthetic Polynucleotide
ggtctctctt

SEQ ID NO: 3156 - DNA, 10 bp, Artificial Sequence
  Synthetic Polynucleotide
tttctataaa

SEQ ID NO: 3157 - DNA, 10 bp, Artificial Sequence
  Synthetic Polynucleotide
ctcctatgga

SEQ ID NO: 3158 - DNA, 10 bp, Artificial Sequence
  Synthetic Polynucleotide
ttcttacaag

SEQ ID NO: 3159 - DNA, 10 bp, Artificial Sequence
  Synthetic Polynucleotide
gcaagcccat

SEQ ID NO: 3160 - DNA, 10 bp, Artificial Sequence
  Synthetic Polynucleotide
ggttgacacg

SEQ ID NO: 3161 - DNA, 10 bp, Artificial Sequence
  Synthetic Polynucleotide
ctaatcgggg

SEQ ID NO: 3162 - DNA, 10 bp, Artificial Sequence
  Synthetic Polynucleotide
gagatggacc

SEQ ID NO: 3163 - DNA, 10 bp, Artificial Sequence
  Synthetic Polynucleotide
gataataatc

SEQ ID NO: 3164 - DNA, 10 bp, Artificial Sequence
  Synthetic Polynucleotide
aaatttccac

SEQ ID NO: 3165 - DNA, 10 bp, Artificial Sequence
  Synthetic Polynucleotide
tcatcagtgt

SEQ ID NO: 3166 - DNA, 10 bp, Artificial Sequence
  Synthetic Polynucleotide
tcgatgaggt

SEQ ID NO: 3167 - DNA, 10 bp, Artificial Sequence
  Synthetic Polynucleotide
cttcacgcaa

SEQ ID NO: 3168 - DNA, 10 bp, Artificial Sequence
  Synthetic Polynucleotide
atgagattaa

SEQ ID NO: 3169 - DNA, 10 bp, Artificial Sequence
  Synthetic Polynucleotide
gagcatttat

SEQ ID NO: 3170 - DNA, 10 bp, Artificial Sequence
  Synthetic Polynucleotide
acctccactg

SEQ ID NO: 3171 - DNA, 10 bp, Artificial Sequence
  Synthetic Polynucleotide
tatctagcga

SEQ ID NO: 3172 - DNA, 10 bp, Artificial Sequence
  Synthetic Polynucleotide
gtggctcgcc

SEQ ID NO: 3173 - DNA, 10 bp, Artificial Sequence
  Synthetic Polynucleotide
gtatatgacc

SEQ ID NO: 3174 - DNA, 10 bp, Artificial Sequence
  Synthetic Polynucleotide
gatttccaga

SEQ ID NO: 3175 - DNA, 10 bp, Artificial Sequence
  Synthetic Polynucleotide
ctaagggtca

SEQ ID NO: 3176 - DNA, 10 bp, Artificial Sequence
  Synthetic Polynucleotide
tacgatgtcg

SEQ ID NO: 3177 - DNA, 10 bp, Artificial Sequence
  Synthetic Polynucleotide
aggcacgact

SEQ ID NO: 3178 - DNA, 10 bp, Artificial Sequence
  Synthetic Polynucleotide
ggtgatgaac

SEQ ID NO: 3179 - DNA, 10 bp, Artificial Sequence
  Synthetic Polynucleotide
gactatgtgg

SEQ ID NO: 3180 - DNA, 10 bp, Artificial Sequence
  Synthetic Polynucleotide
tatctgtacc

SEQ ID NO: 3181 - DNA, 10 bp, Artificial Sequence
  Synthetic Polynucleotide
tcttcttaaa

SEQ ID NO: 3182 - DNA, 10 bp, Artificial Sequence
  Synthetic Polynucleotide
ggaaagaagg

SEQ ID NO: 3183 - DNA, 10 bp, Artificial Sequence
  Synthetic Polynucleotide
tcttattacc

SEQ ID NO: 3184 - DNA, 10 bp, Artificial Sequence
  Synthetic Polynucleotide
tttctttaaa

SEQ ID NO: 3185 - DNA, 10 bp, Artificial Sequence
  Synthetic Polynucleotide
tccattcagg

SEQ ID NO: 3186 - DNA, 10 bp, Artificial Sequence
  Synthetic Polynucleotide
tttgtcactg

SEQ ID NO: 3187 - DNA, 10 bp, Artificial Sequence
  Synthetic Polynucleotide
acttcggacc

SEQ ID NO: 3188 - DNA, 10 bp, Artificial Sequence
  Synthetic Polynucleotide
actagtgatt

SEQ ID NO: 3189 - DNA, 10 bp, Artificial Sequence
  Synthetic Polynucleotide
atcattaaaa

SEQ ID NO: 3190 - DNA, 10 bp, Artificial Sequence
  Synthetic Polynucleotide
caaaatttcc

SEQ ID NO: 3191 - DNA, 10 bp, Artificial Sequence
  Synthetic Polynucleotide
gatcatcttc

SEQ ID NO: 3192 - DNA, 10 bp, Artificial Sequence
  Synthetic Polynucleotide
aattttgttt

SEQ ID NO: 3193 - DNA, 10 bp, Artificial Sequence
  Synthetic Polynucleotide
gcgcacgagt

SEQ ID NO: 3194 - DNA, 10 bp, Artificial Sequence
  Synthetic Polynucleotide
gaatcgtcgg

SEQ ID NO: 3195 - DNA, 10 bp, Artificial Sequence
  Synthetic Polynucleotide
tcttgatagt

SEQ ID NO: 3196 - DNA, 10 bp, Artificial Sequence
  Synthetic Polynucleotide
agtctattgg

SEQ ID NO: 3197 - DNA, 10 bp, Artificial Sequence
  Synthetic Polynucleotide
atcatcccat

SEQ ID NO: 3198 - DNA, 10 bp, Artificial Sequence
  Synthetic Polynucleotide
ttttcttcct

SEQ ID NO: 3199 - DNA, 10 bp, Artificial Sequence
  Synthetic Polynucleotide
cttctcaatg

SEQ ID NO: 3200 - DNA, 10 bp, Artificial Sequence
  Synthetic Polynucleotide
ctctatgaag

SEQ ID NO: 3201 - DNA, 10 bp, Artificial Sequence
  Synthetic Polynucleotide
gaacaatcgg

SEQ ID NO: 3202 - DNA, 10 bp, Artificial Sequence
  Synthetic Polynucleotide
tgtctcttga

SEQ ID NO: 3203 - DNA, 10 bp, Artificial Sequence
  Synthetic Polynucleotide
aatctgccca

SEQ ID NO: 3204 - DNA, 10 bp, Artificial Sequence
  Synthetic Polynucleotide
gatcaaccat

SEQ ID NO: 3205 - DNA, 10 bp, Artificial Sequence
  Synthetic Polynucleotide
attacgtttg

SEQ ID NO: 3206 - DNA, 10 bp, Artificial Sequence
  Synthetic Polynucleotide
cttaaatcct

SEQ ID NO: 3207 - DNA, 10 bp, Artificial Sequence
  Synthetic Polynucleotide
aaataaactt

SEQ ID NO: 3208 - DNA, 10 bp, Artificial Sequence
  Synthetic Polynucleotide
tctcattgta

SEQ ID NO: 3209 - DNA, 10 bp, Artificial Sequence
  Synthetic Polynucleotide
atgaagagta

SEQ ID NO: 3210 - DNA, 10 bp, Artificial Sequence
  Synthetic Polynucleotide
atactgaaga

SEQ ID NO: 3211 - DNA, 10 bp, Artificial Sequence
  Synthetic Polynucleotide
gagcttcgtg

SEQ ID NO: 3212 - DNA, 10 bp, Artificial Sequence
  Synthetic Polynucleotide
gagttgatga

SEQ ID NO: 3213 - DNA, 10 bp, Artificial Sequence
  Synthetic Polynucleotide
actactcaaa

SEQ ID NO: 3214 - DNA, 10 bp, Artificial Sequence
  Synthetic Polynucleotide
ccatagaagg

SEQ ID NO: 3215 - DNA, 10 bp, Artificial Sequence
  Synthetic Polynucleotide
aacaacatgt

SEQ ID NO: 3216 - DNA, 10 bp, Artificial Sequence
  Synthetic Polynucleotide
tcaaacacta

SEQ ID NO: 3217 - DNA, 10 bp, Artificial Sequence
  Synthetic Polynucleotide
accaggctct

SEQ ID NO: 3218 - DNA, 10 bp, Artificial Sequence
  Synthetic Polynucleotide
acgccatctt

SEQ ID NO: 3219 - DNA, 10 bp, Artificial Sequence
  Synthetic Polynucleotide
tttacgtgcc

SEQ ID NO: 3220 - DNA, 10 bp, Artificial Sequence
  Synthetic Polynucleotide
tgtggtaagt

SEQ ID NO: 3221 - DNA, 10 bp, Artificial Sequence
  Synthetic Polynucleotide
tgatgagtac

SEQ ID NO: 3222 - DNA, 10 bp, Artificial Sequence
  Synthetic Polynucleotide
taatctgcat

SEQ ID NO: 3223 - DNA, 10 bp, Artificial Sequence
  Synthetic Polynucleotide
gattggaatg

SEQ ID NO: 3224 - DNA, 10 bp, Artificial Sequence
  Synthetic Polynucleotide
tcttttggtc

SEQ ID NO: 3225 - DNA, 10 bp, Artificial Sequence
  Synthetic Polynucleotide
aagaaactgg

SEQ ID NO: 3226 - DNA, 10 bp, Artificial Sequence
  Synthetic Polynucleotide
acattcacaa

SEQ ID NO: 3227 - DNA, 10 bp, Artificial Sequence
  Synthetic Polynucleotide
tttggtctgc

SEQ ID NO: 3228 - DNA, 10 bp, Artificial Sequence
  Synthetic Polynucleotide
ttttcagaat

SEQ ID NO: 3229 - DNA, 10 bp, Artificial Sequence
  Synthetic Polynucleotide
gtatcagagc

SEQ ID NO: 3230 - DNA, 10 bp, Artificial Sequence
  Synthetic Polynucleotide
ttcttctttt

SEQ ID NO: 3231 - DNA, 10 bp, Artificial Sequence
  Synthetic Polynucleotide
aagcagaaaa

SEQ ID NO: 3232 - DNA, 10 bp, Artificial Sequence
  Synthetic Polynucleotide
cttcttcatc

SEQ ID NO: 3233 - DNA, 10 bp, Artificial Sequence
  Synthetic Polynucleotide
gaagatgaag

SEQ ID NO: 3234 - DNA, 10 bp, Artificial Sequence
  Synthetic Polynucleotide
acatgcttca

SEQ ID NO: 3235 - DNA, 10 bp, Artificial Sequence
  Synthetic Polynucleotide
cacaggagca

SEQ ID NO: 3236 - DNA, 10 bp, Artificial Sequence
  Synthetic Polynucleotide
cttcttctga

SEQ ID NO: 3237 - DNA, 10 bp, Artificial Sequence
  Synthetic Polynucleotide
aaaagaaaat

SEQ ID NO: 3238 - DNA, 10 bp, Artificial Sequence
  Synthetic Polynucleotide
gatttgcttc

SEQ ID NO: 3239 - DNA, 10 bp, Artificial Sequence
  Synthetic Polynucleotide
ataatgatga

SEQ ID NO: 3240 - DNA, 10 bp, Artificial Sequence
  Synthetic Polynucleotide
aattctattt

SEQ ID NO: 3241 - DNA, 10 bp, Artificial Sequence
  Synthetic Polynucleotide
gaaaataaag

SEQ ID NO: 3242 - DNA, 10 bp, Artificial Sequence
  Synthetic Polynucleotide
tgtagtcagt

SEQ ID NO: 3243 - DNA, 10 bp, Artificial Sequence
  Synthetic Polynucleotide
aaccccatca

SEQ ID NO: 3244 - DNA, 10 bp, Artificial Sequence
  Synthetic Polynucleotide
tggaagtttt

SEQ ID NO: 3245 - DNA, 10 bp, Artificial Sequence
  Synthetic Polynucleotide
atgccttttg

SEQ ID NO: 3246 - DNA, 10 bp, Artificial Sequence
  Synthetic Polynucleotide
acacttaaag

SEQ ID NO: 3247 - DNA, 10 bp, Artificial Sequence
  Synthetic Polynucleotide
tgagcttagg

SEQ ID NO: 3248 - DNA, 10 bp, Artificial Sequence
  Synthetic Polynucleotide
gtttgttgtt

SEQ ID NO: 3249 - DNA, 10 bp, Artificial Sequence
  Synthetic Polynucleotide
cctgaggagg

SEQ ID NO: 3250 - DNA, 10 bp, Artificial Sequence
  Synthetic Polynucleotide
atttctacgc

SEQ ID NO: 3251 - DNA, 10 bp, Artificial Sequence
  Synthetic Polynucleotide
ttgctacacc

SEQ ID NO: 3252 - DNA, 10 bp, Artificial Sequence
  Synthetic Polynucleotide
tcccaccact

SEQ ID NO: 3253 - DNA, 10 bp, Artificial Sequence
  Synthetic Polynucleotide
attggaagac

SEQ ID NO: 3254 - DNA, 10 bp, Artificial Sequence
  Synthetic Polynucleotide
ttgatggggt

SEQ ID NO: 3255 - DNA, 10 bp, Artificial Sequence
  Synthetic Polynucleotide
tttgtggagt

SEQ ID NO: 3256 - DNA, 10 bp, Artificial Sequence
  Synthetic Polynucleotide
cgtgaacttg

SEQ ID NO: 3257 - DNA, 10 bp, Artificial Sequence
  Synthetic Polynucleotide
aaagtgacgt

SEQ ID NO: 3258 - DNA, 10 bp, Artificial Sequence
  Synthetic Polynucleotide
catacaatcc

SEQ ID NO: 3259 - DNA, 10 bp, Artificial Sequence
  Synthetic Polynucleotide
ttgatgactt

SEQ ID NO: 3260 - DNA, 10 bp, Artificial Sequence
  Synthetic Polynucleotide
cacctttcat

SEQ ID NO: 3261 - DNA, 10 bp, Artificial Sequence
  Synthetic Polynucleotide
cgcgagagtt

SEQ ID NO: 3262 - DNA, 10 bp, Artificial Sequence
  Synthetic Polynucleotide
tctccgccca

SEQ ID NO: 3263 - DNA, 10 bp, Artificial Sequence
  Synthetic Polynucleotide
tgtatcgtcg

SEQ ID NO: 3264 - DNA, 10 bp, Artificial Sequence
  Synthetic Polynucleotide
ctcttgccac

SEQ ID NO: 3265 - DNA, 10 bp, Artificial Sequence
  Synthetic Polynucleotide
ggataatgaa

SEQ ID NO: 3266 - DNA, 10 bp, Artificial Sequence
  Synthetic Polynucleotide
tggctcgtag

SEQ ID NO: 3267 - DNA, 10 bp, Artificial Sequence
  Synthetic Polynucleotide
tctatatctc

SEQ ID NO: 3268 - DNA, 10 bp, Artificial Sequence
  Synthetic Polynucleotide
tctatgattt

SEQ ID NO: 3269 - DNA, 10 bp, Artificial Sequence
  Synthetic Polynucleotide
ttcttgaatt

SEQ ID NO: 3270 - DNA, 10 bp, Artificial Sequence
  Synthetic Polynucleotide
tatgactctt

SEQ ID NO: 3271 - DNA, 10 bp, Artificial Sequence
  Synthetic Polynucleotide
tcacaaactg

SEQ ID NO: 3272 - DNA, 10 bp, Artificial Sequence
  Synthetic Polynucleotide
gattttggta

SEQ ID NO: 3273 - DNA, 10 bp, Artificial Sequence
  Synthetic Polynucleotide
tctcaaaacc

SEQ ID NO: 3274 - DNA, 10 bp, Artificial Sequence
  Synthetic Polynucleotide
tcttgtttaa

SEQ ID NO: 3275 - DNA, 10 bp, Artificial Sequence
  Synthetic Polynucleotide
aaccatcttt

SEQ ID NO: 3276 - DNA, 10 bp, Artificial Sequence
  Synthetic Polynucleotide
gaatttattt

SEQ ID NO: 3277 - DNA, 10 bp, Artificial Sequence
  Synthetic Polynucleotide
ttagaacaaa

SEQ ID NO: 3278 - DNA, 10 bp, Artificial Sequence
  Synthetic Polynucleotide
aaatctcaag

SEQ ID NO: 3279 - DNA, 10 bp, Artificial Sequence
  Synthetic Polynucleotide
acattgcctc

SEQ ID NO: 3280 - DNA, 10 bp, Artificial Sequence
  Synthetic Polynucleotide
aagtttcctt

SEQ ID NO: 3281 - DNA, 10 bp, Artificial Sequence
  Synthetic Polynucleotide
ctttggaata

SEQ ID NO: 3282 - DNA, 10 bp, Artificial Sequence
  Synthetic Polynucleotide
catacctcaa

SEQ ID NO: 3283 - DNA, 10 bp, Artificial Sequence
  Synthetic Polynucleotide
tgaaaagttc

SEQ ID NO: 3284 - DNA, 10 bp, Artificial Sequence
  Synthetic Polynucleotide
caatggagag

SEQ ID NO: 3285 - DNA, 10 bp, Artificial Sequence
  Synthetic Polynucleotide
aaaatctttt

SEQ ID NO: 3286 - DNA, 10 bp, Artificial Sequence
  Synthetic Polynucleotide
attttctttt

SEQ ID NO: 3287 - DNA, 10 bp, Artificial Sequence
  Synthetic Polynucleotide
ttttccgggt

SEQ ID NO: 3288 - DNA, 10 bp, Artificial Sequence
  Synthetic Polynucleotide
aaacagcttt

SEQ ID NO: 3289 - DNA, 10 bp, Artificial Sequence
  Synthetic Polynucleotide
catcaccata

SEQ ID NO: 3290 - DNA, 10 bp, Artificial Sequence
  Synthetic Polynucleotide
attgtgatta

SEQ ID NO: 3291 - DNA, 10 bp, Artificial Sequence
  Synthetic Polynucleotide
catcaaatga

SEQ ID NO: 3292 - DNA, 10 bp, Artificial Sequence
  Synthetic Polynucleotide
attacatgga

SEQ ID NO: 3293 - DNA, 10 bp, Artificial Sequence
  Synthetic Polynucleotide
taaacaaata

SEQ ID NO: 3294 - DNA, 10 bp, Artificial Sequence
  Synthetic Polynucleotide
aagaaactca

SEQ ID NO: 3295 - DNA, 10 bp, Artificial Sequence
  Synthetic Polynucleotide
cacactttta

SEQ ID NO: 3296 - DNA, 10 bp, Artificial Sequence
  Synthetic Polynucleotide
actgttaaat

SEQ ID NO: 3297 - DNA, 10 bp, Artificial Sequence
  Synthetic Polynucleotide
tgattcacga

SEQ ID NO: 3298 - DNA, 10 bp, Artificial Sequence
  Synthetic Polynucleotide
caccttaaaa

SEQ ID NO: 3299 - DNA, 10 bp, Artificial Sequence
  Synthetic Polynucleotide
aaagtatacc

SEQ ID NO: 3300 - DNA, 10 bp, Artificial Sequence
  Synthetic Polynucleotide
aattcttgtg

SEQ ID NO: 3301 - DNA, 10 bp, Artificial Sequence
  Synthetic Polynucleotide
tccaagcagc

SEQ ID NO: 3302 - DNA, 10 bp, Artificial Sequence
  Synthetic Polynucleotide
gatattttag

SEQ ID NO: 3303 - DNA, 10 bp, Artificial Sequence
  Synthetic Polynucleotide
cccataagaa

SEQ ID NO: 3304 - DNA, 10 bp, Artificial Sequence
  Synthetic Polynucleotide
tcaagaggaa

SEQ ID NO: 3305 - DNA, 10 bp, Artificial Sequence
  Synthetic Polynucleotide
ttccaaggtg

SEQ ID NO: 3306 - DNA, 10 bp, Artificial Sequence
  Synthetic Polynucleotide
gataaatagc

SEQ ID NO: 3307 - DNA, 10 bp, Artificial Sequence
  Synthetic Polynucleotide
cccaacccat

SEQ ID NO: 3308 - DNA, 10 bp, Artificial Sequence
  Synthetic Polynucleotide
ctcaaatgaa

SEQ ID NO: 3309 - DNA, 10 bp, Artificial Sequence
  Synthetic Polynucleotide
caccaggttt

SEQ ID NO: 3310 - DNA, 10 bp, Artificial Sequence
  Synthetic Polynucleotide
tgaatttgaa

SEQ ID NO: 3311 - DNA, 10 bp, Artificial Sequence
  Synthetic Polynucleotide
gctctatcac

SEQ ID NO: 3312 - DNA, 10 bp, Artificial Sequence
  Synthetic Polynucleotide
ctactatgac

SEQ ID NO: 3313 - DNA, 10 bp, Artificial Sequence
  Synthetic Polynucleotide
aagcaccacc

SEQ ID NO: 3314 - DNA, 10 bp, Artificial Sequence
  Synthetic Polynucleotide
agaataatga

SEQ ID NO: 3315 - DNA, 10 bp, Artificial Sequence
  Synthetic Polynucleotide
atgcaacgtg

SEQ ID NO: 3316 - DNA, 10 bp, Artificial Sequence
  Synthetic Polynucleotide
ttaatacttt

SEQ ID NO: 3317 - DNA, 10 bp, Artificial Sequence
  Synthetic Polynucleotide
gaacggaacg

SEQ ID NO: 3318 - DNA, 10 bp, Artificial Sequence
  Synthetic Polynucleotide
agagcaaaca

SEQ ID NO: 3319 - DNA, 10 bp, Artificial Sequence
  Synthetic Polynucleotide
agtctcgcct

SEQ ID NO: 3320 - DNA, 10 bp, Artificial Sequence
  Synthetic Polynucleotide
gaactcctcg

SEQ ID NO: 3321 - DNA, 10 bp, Artificial Sequence
  Synthetic Polynucleotide
gcagcgaatc

SEQ ID NO: 3322 - DNA, 10 bp, Artificial Sequence
  Synthetic Polynucleotide
tgccttcggg

SEQ ID NO: 3323 - DNA, 10 bp, Artificial Sequence
  Synthetic Polynucleotide
gatctcgtcg

SEQ ID NO: 3324 - DNA, 10 bp, Artificial Sequence
  Synthetic Polynucleotide
gctggcaacc

SEQ ID NO: 3325 - DNA, 10 bp, Artificial Sequence
  Synthetic Polynucleotide
cgaccaccac

SEQ ID NO: 3326 - DNA, 10 bp, Artificial Sequence
  Synthetic Polynucleotide
cgatcaagtc

SEQ ID NO: 3327 - DNA, 10 bp, Artificial Sequence
  Synthetic Polynucleotide
gtaccatcag

SEQ ID NO: 3328 - DNA, 10 bp, Artificial Sequence
  Synthetic Polynucleotide
gaaagagatc

SEQ ID NO: 3329 - DNA, 10 bp, Artificial Sequence
  Synthetic Polynucleotide
gcacgaccgc

SEQ ID NO: 3330 - DNA, 10 bp, Artificial Sequence
  Synthetic Polynucleotide
gaagtatctc

SEQ ID NO: 3331 - DNA, 10 bp, Artificial Sequence
  Synthetic Polynucleotide
agctgttcct

SEQ ID NO: 3332 - DNA, 10 bp, Artificial Sequence
  Synthetic Polynucleotide
ggttacccat

SEQ ID NO: 3333 - DNA, 10 bp, Artificial Sequence
  Synthetic Polynucleotide
catctttcaa

SEQ ID NO: 3334 - DNA, 10 bp, Artificial Sequence
  Synthetic Polynucleotide
taaaggaaaa

SEQ ID NO: 3335 - DNA, 10 bp, Artificial Sequence
  Synthetic Polynucleotide
aaattttctc

SEQ ID NO: 3336 - DNA, 10 bp, Artificial Sequence
  Synthetic Polynucleotide
attattaatt

SEQ ID NO: 3337 - DNA, 10 bp, Artificial Sequence
  Synthetic Polynucleotide
aaaatttgaa

SEQ ID NO: 3338 - DNA, 10 bp, Artificial Sequence
  Synthetic Polynucleotide
ctcaaaacac

SEQ ID NO: 3339 - DNA, 10 bp, Artificial Sequence
  Synthetic Polynucleotide
tagacgtatt

SEQ ID NO: 3340 - DNA, 10 bp, Artificial Sequence
  Synthetic Polynucleotide
acagttgttg

SEQ ID NO: 3341 - DNA, 10 bp, Artificial Sequence
  Synthetic Polynucleotide
ttcttattga

SEQ ID NO: 3342 - DNA, 10 bp, Artificial Sequence
  Synthetic Polynucleotide
gttagacatg

SEQ ID NO: 3343 - DNA, 10 bp, Artificial Sequence
  Synthetic Polynucleotide
tttcttaatc

SEQ ID NO: 3344 - DNA, 10 bp, Artificial Sequence
  Synthetic Polynucleotide
cagtattgaa

SEQ ID NO: 3345 - DNA, 10 bp, Artificial Sequence
  Synthetic Polynucleotide
tagtcaagat

SEQ ID NO: 3346 - DNA, 10 bp, Artificial Sequence
  Synthetic Polynucleotide
tgaggaagat

SEQ ID NO: 3347 - DNA, 10 bp, Artificial Sequence
  Synthetic Polynucleotide
atatgctgtt

SEQ ID NO: 3348 - DNA, 10 bp, Artificial Sequence
  Synthetic Polynucleotide
agaggagacc

SEQ ID NO: 3349 - DNA, 10 bp, Artificial Sequence
  Synthetic Polynucleotide
ccctatcagg

SEQ ID NO: 3350 - DNA, 10 bp, Artificial Sequence
  Synthetic Polynucleotide
gccatagtgg

SEQ ID NO: 3351 - DNA, 10 bp, Artificial Sequence
  Synthetic Polynucleotide
tccatgtgcc

SEQ ID NO: 3352 - DNA, 10 bp, Artificial Sequence
  Synthetic Polynucleotide
taggactagc

SEQ ID NO: 3353 - DNA, 10 bp, Artificial Sequence
  Synthetic Polynucleotide
ccatcatgtt

SEQ ID NO: 3354 - DNA, 10 bp, Artificial Sequence
  Synthetic Polynucleotide
atgactgaca

SEQ ID NO: 3355 - DNA, 10 bp, Artificial Sequence
  Synthetic Polynucleotide
tgtcccatcc

SEQ ID NO: 3356 - DNA, 10 bp, Artificial Sequence
  Synthetic Polynucleotide
acatgtggct

SEQ ID NO: 3357 - DNA, 10 bp, Artificial Sequence
  Synthetic Polynucleotide
cctgtggacc

SEQ ID NO: 3358 - DNA, 10 bp, Artificial Sequence
  Synthetic Polynucleotide
gtaaatcccg

SEQ ID NO: 3359 - DNA, 10 bp, Artificial Sequence
  Synthetic Polynucleotide
tcatcaccac

SEQ ID NO: 3360 - DNA, 10 bp, Artificial Sequence
  Synthetic Polynucleotide
agaaaagaaa

SEQ ID NO: 3361 - DNA, 10 bp, Artificial Sequence
  Synthetic Polynucleotide
ttcatcatca

SEQ ID NO: 3362 - DNA, 10 bp, Artificial Sequence
  Synthetic Polynucleotide
aaggtcatcg

SEQ ID NO: 3363 - DNA, 10 bp, Artificial Sequence
  Synthetic Polynucleotide
gtgttcaagg

SEQ ID NO: 3364 - DNA, 10 bp, Artificial Sequence
  Synthetic Polynucleotide
gtgaaagtag

SEQ ID NO: 3365 - DNA, 10 bp, Artificial Sequence
  Synthetic Polynucleotide
atgccaaagt

SEQ ID NO: 3366 - DNA, 10 bp, Artificial Sequence
  Synthetic Polynucleotide
ttcaaagaaa

SEQ ID NO: 3367 - DNA, 10 bp, Artificial Sequence
  Synthetic Polynucleotide
ttctccatca

SEQ ID NO: 3368 - DNA, 10 bp, Artificial Sequence
  Synthetic Polynucleotide
gtcaccgcag

SEQ ID NO: 3369 - DNA, 10 bp, Artificial Sequence
  Synthetic Polynucleotide
tgaccaccac

SEQ ID NO: 3370 - DNA, 10 bp, Artificial Sequence
  Synthetic Polynucleotide
ggatgagttg

SEQ ID NO: 3371 - DNA, 10 bp, Artificial Sequence
  Synthetic Polynucleotide
cagcagttag

SEQ ID NO: 3372 - DNA, 10 bp, Artificial Sequence
  Synthetic Polynucleotide
caacaaagaa

SEQ ID NO: 3373 - DNA, 10 bp, Artificial Sequence
  Synthetic Polynucleotide
gtgactccat

SEQ ID NO: 3374 - DNA, 10 bp, Artificial Sequence
  Synthetic Polynucleotide
ggttaagttt

SEQ ID NO: 3375 - DNA, 10 bp, Artificial Sequence
  Synthetic Polynucleotide
cacatccata

SEQ ID NO: 3376 - DNA, 10 bp, Artificial Sequence
  Synthetic Polynucleotide
atgatatgtg

SEQ ID NO: 3377 - DNA, 10 bp, Artificial Sequence
  Synthetic Polynucleotide
cgaagaagtc

SEQ ID NO: 3378 - DNA, 10 bp, Artificial Sequence
  Synthetic Polynucleotide
gggttaagtt

SEQ ID NO: 3379 - DNA, 10 bp, Artificial Sequence
  Synthetic Polynucleotide
acatgtcatc

SEQ ID NO: 3380 - DNA, 10 bp, Artificial Sequence
  Synthetic Polynucleotide
gattatgagg

SEQ ID NO: 3381 - DNA, 10 bp, Artificial Sequence
  Synthetic Polynucleotide
tgtaatcctc

SEQ ID NO: 3382 - DNA, 10 bp, Artificial Sequence
  Synthetic Polynucleotide
aaaagattga

SEQ ID NO: 3383 - DNA, 10 bp, Artificial Sequence
  Synthetic Polynucleotide
gcttgttggt

SEQ ID NO: 3384 - DNA, 10 bp, Artificial Sequence
  Synthetic Polynucleotide
tcaatgccac

SEQ ID NO: 3385 - DNA, 10 bp, Artificial Sequence
  Synthetic Polynucleotide
atgcaaaatc

SEQ ID NO: 3386 - DNA, 10 bp, Artificial Sequence
  Synthetic Polynucleotide
gaaattgatt

SEQ ID NO: 3387 - DNA, 10 bp, Artificial Sequence
  Synthetic Polynucleotide
cactcagtgt

SEQ ID NO: 3388 - DNA, 10 bp, Artificial Sequence
  Synthetic Polynucleotide
aatgggtcaa

SEQ ID NO: 3389 - DNA, 10 bp, Artificial Sequence
  Synthetic Polynucleotide
ccatcttgtg

SEQ ID NO: 3390 - DNA, 10 bp, Artificial Sequence
  Synthetic Polynucleotide
tgggtgaaga

SEQ ID NO: 3391 - DNA, 10 bp, Artificial Sequence
  Synthetic Polynucleotide
tgaggtagcc

SEQ ID NO: 3392 - DNA, 10 bp, Artificial Sequence
  Synthetic Polynucleotide
tgcaacatcg

SEQ ID NO: 3393 - DNA, 10 bp, Artificial Sequence
  Synthetic Polynucleotide
tatcatctcc

SEQ ID NO: 3394 - DNA, 10 bp, Artificial Sequence
  Synthetic Polynucleotide
gtctgattat

SEQ ID NO: 3395 - DNA, 10 bp, Artificial Sequence
  Synthetic Polynucleotide
ttcggtttcc

SEQ ID NO: 3396 - DNA, 10 bp, Artificial Sequence
  Synthetic Polynucleotide
tccaacctgt

SEQ ID NO: 3397 - DNA, 10 bp, Artificial Sequence
  Synthetic Polynucleotide
ccatttcttg

SEQ ID NO: 3398 - DNA, 10 bp, Artificial Sequence
  Synthetic Polynucleotide
tttaggtccc

SEQ ID NO: 3399 - DNA, 10 bp, Artificial Sequence
  Synthetic Polynucleotide
tgtctttgtc

SEQ ID NO: 3400 - DNA, 10 bp, Artificial Sequence
  Synthetic Polynucleotide
gctaagctat

SEQ ID NO: 3401 - DNA, 10 bp, Artificial Sequence
  Synthetic Polynucleotide
cgcaaagtta

SEQ ID NO: 3402 - DNA, 10 bp, Artificial Sequence
  Synthetic Polynucleotide
atagataatt

SEQ ID NO: 3403 - DNA, 10 bp, Artificial Sequence
  Synthetic Polynucleotide
atcactcctc

SEQ ID NO: 3404 - DNA, 10 bp, Artificial Sequence
  Synthetic Polynucleotide
tttcaagcac

SEQ ID NO: 3405 - DNA, 10 bp, Artificial Sequence
  Synthetic Polynucleotide
ctcctctctt

SEQ ID NO: 3406 - DNA, 10 bp, Artificial Sequence
  Synthetic Polynucleotide
cagatagacg

SEQ ID NO: 3407 - DNA, 10 bp, Artificial Sequence
  Synthetic Polynucleotide
gttgatgaat

SEQ ID NO: 3408 - DNA, 10 bp, Artificial Sequence
  Synthetic Polynucleotide
ccagaagcaa

SEQ ID NO: 3409 - DNA, 10 bp, Artificial Sequence
  Synthetic Polynucleotide
tgtttaattt

SEQ ID NO: 3410 - DNA, 10 bp, Artificial Sequence
  Synthetic Polynucleotide
tgtgaaataa

SEQ ID NO: 3411 - DNA, 10 bp, Artificial Sequence
  Synthetic Polynucleotide
aggtcttttg

SEQ ID NO: 3412 - DNA, 10 bp, Artificial Sequence
  Synthetic Polynucleotide
ctgcactctc

SEQ ID NO: 3413 - DNA, 10 bp, Artificial Sequence
  Synthetic Polynucleotide
taataattga

SEQ ID NO: 3414 - DNA, 10 bp, Artificial Sequence
  Synthetic Polynucleotide
atgcagattt

SEQ ID NO: 3415 - DNA, 10 bp, Artificial Sequence
  Synthetic Polynucleotide
caaacatggt

SEQ ID NO: 3416 - DNA, 10 bp, Artificial Sequence
  Synthetic Polynucleotide
cggaacagaa

SEQ ID NO: 3417 - DNA, 10 bp, Artificial Sequence
  Synthetic Polynucleotide
ttaatgtatt

SEQ ID NO: 3418 - DNA, 10 bp, Artificial Sequence
  Synthetic Polynucleotide
tatacccatt

SEQ ID NO: 3419 - DNA, 10 bp, Artificial Sequence
  Synthetic Polynucleotide
aaattaaagg

SEQ ID NO: 3420 - DNA, 10 bp, Artificial Sequence
  Synthetic Polynucleotide
cccctgtgcg

SEQ ID NO: 3421 - DNA, 10 bp, Artificial Sequence
  Synthetic Polynucleotide
tttattaatt

SEQ ID NO: 3422 - DNA, 10 bp, Artificial Sequence
  Synthetic Polynucleotide
ttgtatatgg

SEQ ID NO: 3423 - DNA, 10 bp, Artificial Sequence
  Synthetic Polynucleotide
ttcttccact

SEQ ID NO: 3424 - DNA, 10 bp, Artificial Sequence
  Synthetic Polynucleotide
tcgtggtgaa

SEQ ID NO: 3425 - DNA, 10 bp, Artificial Sequence
  Synthetic Polynucleotide
taactgagat

SEQ ID NO: 3426 - DNA, 10 bp, Artificial Sequence
  Synthetic Polynucleotide
agatctatgt

SEQ ID NO: 3427 - DNA, 10 bp, Artificial Sequence
  Synthetic Polynucleotide
cgtcattgat

SEQ ID NO: 3428 - DNA, 10 bp, Artificial Sequence
  Synthetic Polynucleotide
tgtggttgaa

SEQ ID NO: 3429 - DNA, 10 bp, Artificial Sequence
  Synthetic Polynucleotide
taattcaaat

SEQ ID NO: 3430 - DNA, 10 bp, Artificial Sequence
  Synthetic Polynucleotide
ccggatggcc

SEQ ID NO: 3431 - DNA, 10 bp, Artificial Sequence
  Synthetic Polynucleotide
cttcctgggc

SEQ ID NO: 3432 - DNA, 10 bp, Artificial Sequence
  Synthetic Polynucleotide
tattttattt

SEQ ID NO: 3433 - DNA, 10 bp, Artificial Sequence
  Synthetic Polynucleotide
taatttccac

SEQ ID NO: 3434 - DNA, 10 bp, Artificial Sequence
  Synthetic Polynucleotide
tacatcaagt

SEQ ID NO: 3435 - DNA, 10 bp, Artificial Sequence
  Synthetic Polynucleotide
ggagagttga

SEQ ID NO: 3436 - DNA, 10 bp, Artificial Sequence
  Synthetic Polynucleotide
aattacattg

SEQ ID NO: 3437 - DNA, 10 bp, Artificial Sequence
  Synthetic Polynucleotide
cggcgaaaca

SEQ ID NO: 3438 - DNA, 10 bp, Artificial Sequence
  Synthetic Polynucleotide
gttggatgtc

SEQ ID NO: 3439 - DNA, 10 bp, Artificial Sequence
  Synthetic Polynucleotide
cactacttct

SEQ ID NO: 3440 - DNA, 10 bp, Artificial Sequence
  Synthetic Polynucleotide
cagaagtcta

SEQ ID NO: 3441 - DNA, 10 bp, Artificial Sequence
  Synthetic Polynucleotide
tcccaaaatc

SEQ ID NO: 3442 - DNA, 10 bp, Artificial Sequence
  Synthetic Polynucleotide
cctattagac

SEQ ID NO: 3443 - DNA, 10 bp, Artificial Sequence
  Synthetic Polynucleotide
tacatctgcg

SEQ ID NO: 3444 - DNA, 10 bp, Artificial Sequence
  Synthetic Polynucleotide
attttcttct

SEQ ID NO: 3445 - DNA, 10 bp, Artificial Sequence
  Synthetic Polynucleotide
ttgcaccgaa

SEQ ID NO: 3446 - DNA, 10 bp, Artificial Sequence
  Synthetic Polynucleotide
attgaacgtg

SEQ ID NO: 3447 - DNA, 10 bp, Artificial Sequence
  Synthetic Polynucleotide
tttctggtcc

SEQ ID NO: 3448 - DNA, 10 bp, Artificial Sequence
  Synthetic Polynucleotide
ttcaaagacg

SEQ ID NO: 3449 - DNA, 10 bp, Artificial Sequence
  Synthetic Polynucleotide
ccatggtgaa

SEQ ID NO: 3450 - DNA, 10 bp, Artificial Sequence
  Synthetic Polynucleotide
gaaggacatc

SEQ ID NO: 3451 - DNA, 10 bp, Artificial Sequence
  Synthetic Polynucleotide
ctccagtcga

SEQ ID NO: 3452 - DNA, 10 bp, Artificial Sequence
  Synthetic Polynucleotide
cattttgaac

SEQ ID NO: 3453 - DNA, 10 bp, Artificial Sequence
  Synthetic Polynucleotide
ttgcgagcag

SEQ ID NO: 3454 - DNA, 10 bp, Artificial Sequence
  Synthetic Polynucleotide
ggtatttgta

SEQ ID NO: 3455 - DNA, 10 bp, Artificial Sequence
  Synthetic Polynucleotide
tatcacgccc

SEQ ID NO: 3456 - DNA, 10 bp, Artificial Sequence
  Synthetic Polynucleotide
tttgtgggaa

SEQ ID NO: 3457 - DNA, 10 bp, Artificial Sequence
  Synthetic Polynucleotide
agaagatgag

SEQ ID NO: 3458 - DNA, 10 bp, Artificial Sequence
  Synthetic Polynucleotide
gacttctctc

SEQ ID NO: 3459 - DNA, 10 bp, Artificial Sequence
  Synthetic Polynucleotide
aggaagatga

SEQ ID NO: 3460 - DNA, 10 bp, Artificial Sequence
  Synthetic Polynucleotide
tttcttgttg

SEQ ID NO: 3461 - DNA, 10 bp, Artificial Sequence
  Synthetic Polynucleotide
tacagcctcc

SEQ ID NO: 3462 - DNA, 10 bp, Artificial Sequence
  Synthetic Polynucleotide
catggctgct

SEQ ID NO: 3463 - DNA, 10 bp, Artificial Sequence
  Synthetic Polynucleotide
gtcaccccag

SEQ ID NO: 3464 - DNA, 10 bp, Artificial Sequence
  Synthetic Polynucleotide
tgaataacat

SEQ ID NO: 3465 - DNA, 10 bp, Artificial Sequence
  Synthetic Polynucleotide
ttcccatagt

SEQ ID NO: 3466 - DNA, 10 bp, Artificial Sequence
  Synthetic Polynucleotide
aggatgccgt

SEQ ID NO: 3467 - DNA, 10 bp, Artificial Sequence
  Synthetic Polynucleotide
gacggggacg

SEQ ID NO: 3468 - DNA, 10 bp, Artificial Sequence
  Synthetic Polynucleotide
gtcctcgtcc

SEQ ID NO: 3469 - DNA, 10 bp, Artificial Sequence
  Synthetic Polynucleotide
cgccgccgcc

SEQ ID NO: 3470 - DNA, 10 bp, Artificial Sequence
  Synthetic Polynucleotide
gcgccgccgc

SEQ ID NO: 3471 - DNA, 10 bp, Artificial Sequence
  Synthetic Polynucleotide
ataaaacaca

SEQ ID NO: 3472 - DNA, 10 bp, Artificial Sequence
  Synthetic Polynucleotide
gcctgtcaaa

SEQ ID NO: 3473 - DNA, 10 bp, Artificial Sequence
  Synthetic Polynucleotide
tattttaaaa

SEQ ID NO: 3474 - DNA, 10 bp, Artificial Sequence
  Synthetic Polynucleotide
atcttgaaat

SEQ ID NO: 3475 - DNA, 10 bp, Artificial Sequence
  Synthetic Polynucleotide
tgtttatgtt

SEQ ID NO: 3476 - DNA, 10 bp, Artificial Sequence
  Synthetic Polynucleotide
gccatcataa

SEQ ID NO: 3477 - DNA, 10 bp, Artificial Sequence
  Synthetic Polynucleotide
aaaataaaca

SEQ ID NO: 3478 - DNA, 10 bp, Artificial Sequence
  Synthetic Polynucleotide
tttggaaaat

SEQ ID NO: 3479 - DNA, 10 bp, Artificial Sequence
  Synthetic Polynucleotide
ttcatcatat

SEQ ID NO: 3480 - DNA, 10 bp, Artificial Sequence
  Synthetic Polynucleotide
atcaacaaat

SEQ ID NO: 3481 - DNA, 10 bp, Artificial Sequence
  Synthetic Polynucleotide
ctgccgctgc

SEQ ID NO: 3482 - DNA, 10 bp, Artificial Sequence
  Synthetic Polynucleotide
ttgactacat

SEQ ID NO: 3483 - DNA, 10 bp, Artificial Sequence
  Synthetic Polynucleotide
gtcttcgtcg

SEQ ID NO: 3484 - DNA, 10 bp, Artificial Sequence
  Synthetic Polynucleotide
gggtctgcaa

SEQ ID NO: 3485 - DNA, 10 bp, Artificial Sequence
  Synthetic Polynucleotide
ccgcatagag

SEQ ID NO: 3486 - DNA, 10 bp, Artificial Sequence
  Synthetic Polynucleotide
ggccacttta

SEQ ID NO: 3487 - DNA, 10 bp, Artificial Sequence
  Synthetic Polynucleotide
ttgtggtgga

SEQ ID NO: 3488 - DNA, 10 bp, Artificial Sequence
  Synthetic Polynucleotide
gcgaaggagg

SEQ ID NO: 3489 - DNA, 10 bp, Artificial Sequence
  Synthetic Polynucleotide
cacagttcag

SEQ ID NO: 3490 - DNA, 10 bp, Artificial Sequence
  Synthetic Polynucleotide
acatcaatcg

SEQ ID NO: 3491 - DNA, 10 bp, Artificial Sequence
  Synthetic Polynucleotide
acggtttcaa

SEQ ID NO: 3492 - DNA, 10 bp, Artificial Sequence
  Synthetic Polynucleotide
gtatctacaa

SEQ ID NO: 3493 - DNA, 10 bp, Artificial Sequence
  Synthetic Polynucleotide
ccatatttaa

SEQ ID NO: 3494 - DNA, 10 bp, Artificial Sequence
  Synthetic Polynucleotide
gggatattat

SEQ ID NO: 3495 - DNA, 10 bp, Artificial Sequence
  Synthetic Polynucleotide
tatttatttt

SEQ ID NO: 3496 - DNA, 10 bp, Artificial Sequence
  Synthetic Polynucleotide
atagtaaaga

SEQ ID NO: 3497 - DNA, 10 bp, Artificial Sequence
  Synthetic Polynucleotide
aggctttagc

SEQ ID NO: 3498 - DNA, 10 bp, Artificial Sequence
  Synthetic Polynucleotide
atgaagaacc

SEQ ID NO: 3499 - DNA, 10 bp, Artificial Sequence
  Synthetic Polynucleotide
gccgccaacg

SEQ ID NO: 3500 - DNA, 10 bp, Artificial Sequence
  Synthetic Polynucleotide
ggtgacgatg

SEQ ID NO: 3501 - DNA, 10 bp, Artificial Sequence
  Synthetic Polynucleotide
cgccaggact

SEQ ID NO: 3502 - DNA, 10 bp, Artificial Sequence
  Synthetic Polynucleotide
cgtcgatgta

SEQ ID NO: 3503 - DNA, 10 bp, Artificial Sequence
  Synthetic Polynucleotide
ataaagttag

SEQ ID NO: 3504 - DNA, 10 bp, Artificial Sequence
  Synthetic Polynucleotide
aagagcaatt

SEQ ID NO: 3505 - DNA, 10 bp, Artificial Sequence
  Synthetic Polynucleotide
ttttaaaatt

SEQ ID NO: 3506 - DNA, 10 bp, Artificial Sequence
  Synthetic Polynucleotide
taaaatattt

SEQ ID NO: 3507 - DNA, 10 bp, Artificial Sequence
  Synthetic Polynucleotide
tcatcatcaa

SEQ ID NO: 3508 - DNA, 10 bp, Artificial Sequence
  Synthetic Polynucleotide
aaacaccacc

SEQ ID NO: 3509 - DNA, 10 bp, Artificial Sequence
  Synthetic Polynucleotide
atcatggact

SEQ ID NO: 3510 - DNA, 10 bp, Artificial Sequence
  Synthetic Polynucleotide
agatcgggct

SEQ ID NO: 3511 - DNA, 10 bp, Artificial Sequence
  Synthetic Polynucleotide
ccaacgtcag

SEQ ID NO: 3512 - DNA, 10 bp, Artificial Sequence
  Synthetic Polynucleotide
ggtggttctc

SEQ ID NO: 3513 - DNA, 10 bp, Artificial Sequence
  Synthetic Polynucleotide
cagtaactcg

SEQ ID NO: 3514 - DNA, 10 bp, Artificial Sequence
  Synthetic Polynucleotide
aacagtaaaa

SEQ ID NO: 3515 - DNA, 10 bp, Artificial Sequence
  Synthetic Polynucleotide
gtttagcatt

SEQ ID NO: 3516 - DNA, 10 bp, Artificial Sequence
  Synthetic Polynucleotide
gaggaaaatc

SEQ ID NO: 3517 - DNA, 10 bp, Artificial Sequence
  Synthetic Polynucleotide
gaaatagata

SEQ ID NO: 3518 - DNA, 10 bp, Artificial Sequence
  Synthetic Polynucleotide
tttagctatt

SEQ ID NO: 3519 - DNA, 10 bp, Artificial Sequence
  Synthetic Polynucleotide
ctacctattt

SEQ ID NO: 3520 - DNA, 10 bp, Artificial Sequence
  Synthetic Polynucleotide
cctaccatga

SEQ ID NO: 3521 - DNA, 10 bp, Artificial Sequence
  Synthetic Polynucleotide
atcttcttct

SEQ ID NO: 3522 - DNA, 10 bp, Artificial Sequence
  Synthetic Polynucleotide
tttagagggg

SEQ ID NO: 3523 - DNA, 10 bp, Artificial Sequence
  Synthetic Polynucleotide
ccgggctacc

SEQ ID NO: 3524 - DNA, 10 bp, Artificial Sequence
  Synthetic Polynucleotide
ccggtttcgg

SEQ ID NO: 3525 - DNA, 10 bp, Artificial Sequence
  Synthetic Polynucleotide
ccgaggtcct

SEQ ID NO: 3526 - DNA, 10 bp, Artificial Sequence
  Synthetic Polynucleotide
ctcctttcaa

SEQ ID NO: 3527 - DNA, 10 bp, Artificial Sequence
  Synthetic Polynucleotide
acgcactttg

SEQ ID NO: 3528 - DNA, 10 bp, Artificial Sequence
  Synthetic Polynucleotide
tgatgatgtt

SEQ ID NO: 3529 - DNA, 10 bp, Artificial Sequence
  Synthetic Polynucleotide
ggcacacaaa

SEQ ID NO: 3530 - DNA, 10 bp, Artificial Sequence
  Synthetic Polynucleotide
taacactata

SEQ ID NO: 3531 - DNA, 10 bp, Artificial Sequence
  Synthetic Polynucleotide
ctcctgaaaa

SEQ ID NO: 3532 - DNA, 10 bp, Artificial Sequence
  Synthetic Polynucleotide
ttctttagat

SEQ ID NO: 3533 - DNA, 10 bp, Artificial Sequence
  Synthetic Polynucleotide
ttcttggaat

SEQ ID NO: 3534 - DNA, 10 bp, Artificial Sequence
  Synthetic Polynucleotide
cacaaggtaa

SEQ ID NO: 3535 - DNA, 10 bp, Artificial Sequence
  Synthetic Polynucleotide
atcttcttca

SEQ ID NO: 3536 - DNA, 10 bp, Artificial Sequence
  Synthetic Polynucleotide
cttctggatt

SEQ ID NO: 3537 - DNA, 10 bp, Artificial Sequence
  Synthetic Polynucleotide
ttgacctgct

SEQ ID NO: 3538 - DNA, 10 bp, Artificial Sequence
  Synthetic Polynucleotide
atgatgtatt

SEQ ID NO: 3539 - DNA, 10 bp, Artificial Sequence
  Synthetic Polynucleotide
ttacctttta

SEQ ID NO: 3540 - DNA, 10 bp, Artificial Sequence
  Synthetic Polynucleotide
ttattgataa

SEQ ID NO: 3541 - DNA, 10 bp, Artificial Sequence
  Synthetic Polynucleotide
ttgatttctt

SEQ ID NO: 3542 - DNA, 10 bp, Artificial Sequence
  Synthetic Polynucleotide
gatgatttat

SEQ ID NO: 3543 - DNA, 10 bp, Artificial Sequence
  Synthetic Polynucleotide
gccaccgccg

SEQ ID NO: 3544 - DNA, 10 bp, Artificial Sequence
  Synthetic Polynucleotide
gccgagctgg

SEQ ID NO: 3545 - DNA, 10 bp, Artificial Sequence
  Synthetic Polynucleotide
gctaagcaaa

SEQ ID NO: 3546 - DNA, 10 bp, Artificial Sequence
  Synthetic Polynucleotide
aatttcttct

SEQ ID NO: 3547 - DNA, 10 bp, Artificial Sequence
  Synthetic Polynucleotide
caatttcttt

SEQ ID NO: 3548 - DNA, 10 bp, Artificial Sequence
  Synthetic Polynucleotide
gaaactttac

SEQ ID NO: 3549 - DNA, 10 bp, Artificial Sequence
  Synthetic Polynucleotide
acagtgaaga

SEQ ID NO: 3550 - DNA, 10 bp, Artificial Sequence
  Synthetic Polynucleotide
ttcatcaaaa

SEQ ID NO: 3551 - DNA, 10 bp, Artificial Sequence
  Synthetic Polynucleotide
tcgaccctgc

SEQ ID NO: 3552 - DNA, 10 bp, Artificial Sequence
  Synthetic Polynucleotide
ttttcaaaat

SEQ ID NO: 3553 - DNA, 10 bp, Artificial Sequence
  Synthetic Polynucleotide
gaaattaaaa

SEQ ID NO: 3554 - DNA, 10 bp, Artificial Sequence
  Synthetic Polynucleotide
ctcgatcagc

SEQ ID NO: 3555 - DNA, 10 bp, Artificial Sequence
  Synthetic Polynucleotide
gcgctgatcg

SEQ ID NO: 3556 - DNA, 10 bp, Artificial Sequence
  Synthetic Polynucleotide
cgagccgatc

SEQ ID NO: 3557 - DNA, 10 bp, Artificial Sequence
  Synthetic Polynucleotide
cgtcgcacag

SEQ ID NO: 3558 - DNA, 10 bp, Artificial Sequence
  Synthetic Polynucleotide
atttgtcttt

SEQ ID NO: 3559 - DNA, 10 bp, Artificial Sequence
  Synthetic Polynucleotide
cgagaaaatc

SEQ ID NO: 3560 - DNA, 10 bp, Artificial Sequence
  Synthetic Polynucleotide
gccgatgccc

SEQ ID NO: 3561 - DNA, 10 bp, Artificial Sequence
  Synthetic Polynucleotide
tttgataatt

SEQ ID NO: 3562 - DNA, 10 bp, Artificial Sequence
  Synthetic Polynucleotide
tgagctttta

SEQ ID NO: 3563 - DNA, 10 bp, Artificial Sequence
  Synthetic Polynucleotide
accgccaatc

SEQ ID NO: 3564 - DNA, 10 bp, Artificial Sequence
  Synthetic Polynucleotide
acagatcctg

SEQ ID NO: 3565 - DNA, 10 bp, Artificial Sequence
  Synthetic Polynucleotide
agtattaccc

SEQ ID NO: 3566 - DNA, 10 bp, Artificial Sequence
  Synthetic Polynucleotide
tcttcttcaa

SEQ ID NO: 3567 - DNA, 10 bp, Artificial Sequence
  Synthetic Polynucleotide
acaattacat

SEQ ID NO: 3568 - DNA, 10 bp, Artificial Sequence
  Synthetic Polynucleotide
tgggtgtatg

SEQ ID NO: 3569 - DNA, 10 bp, Artificial Sequence
  Synthetic Polynucleotide
aactcgggac

SEQ ID NO: 3570 - DNA, 10 bp, Artificial Sequence
  Synthetic Polynucleotide
catacaacac

SEQ ID NO: 3571 - DNA, 10 bp, Artificial Sequence
  Synthetic Polynucleotide
caaccacctt

SEQ ID NO: 3572 - DNA, 10 bp, Artificial Sequence
  Synthetic Polynucleotide
agtatcttcg

SEQ ID NO: 3573 - DNA, 10 bp, Artificial Sequence
  Synthetic Polynucleotide
tcgcttcgcg

SEQ ID NO: 3574 - DNA, 10 bp, Artificial Sequence
  Synthetic Polynucleotide
attgtgtttg

SEQ ID NO: 3575 - DNA, 10 bp, Artificial Sequence
  Synthetic Polynucleotide
tacagttgtt

SEQ ID NO: 3576 - DNA, 10 bp, Artificial Sequence
  Synthetic Polynucleotide
ataatgattt

SEQ ID NO: 3577 - DNA, 10 bp, Artificial Sequence
  Synthetic Polynucleotide
tgattttcct

SEQ ID NO: 3578 - DNA, 10 bp, Artificial Sequence
  Synthetic Polynucleotide
ttcgatagaa

SEQ ID NO: 3579 - DNA, 10 bp, Artificial Sequence
  Synthetic Polynucleotide
agcacttcaa

SEQ ID NO: 3580 - DNA, 10 bp, Artificial Sequence
  Synthetic Polynucleotide
ggattcacct

SEQ ID NO: 3581 - DNA, 10 bp, Artificial Sequence
  Synthetic Polynucleotide
tcatatgtat

SEQ ID NO: 3582 - DNA, 10 bp, Artificial Sequence
  Synthetic Polynucleotide
tgcaactgat

SEQ ID NO: 3583 - DNA, 10 bp, Artificial Sequence
  Synthetic Polynucleotide
ccgtcagggt

SEQ ID NO: 3584 - DNA, 10 bp, Artificial Sequence
  Synthetic Polynucleotide
ggatcctgat

SEQ ID NO: 3585 - DNA, 10 bp, Artificial Sequence
  Synthetic Polynucleotide
atatcatcac

SEQ ID NO: 3586 - DNA, 10 bp, Artificial Sequence
  Synthetic Polynucleotide
attttactta

SEQ ID NO: 3587 - DNA, 10 bp, Artificial Sequence
  Synthetic Polynucleotide
cttaacggta

SEQ ID NO: 3588 - DNA, 10 bp, Artificial Sequence
  Synthetic Polynucleotide
agtttggagt

SEQ ID NO: 3589 - DNA, 10 bp, Artificial Sequence
  Synthetic Polynucleotide
atggaagtaa

SEQ ID NO: 3590 - DNA, 10 bp, Artificial Sequence
  Synthetic Polynucleotide
actccggcag

SEQ ID NO: 3591 - DNA, 10 bp, Artificial Sequence
  Synthetic Polynucleotide
caaaccaatc

SEQ ID NO: 3592 - DNA, 10 bp, Artificial Sequence
  Synthetic Polynucleotide
tggagcagca

SEQ ID NO: 3593 - DNA, 10 bp, Artificial Sequence
  Synthetic Polynucleotide
ctgacacgtt

SEQ ID NO: 3594 - DNA, 10 bp, Artificial Sequence
  Synthetic Polynucleotide
ttcctgcctg

SEQ ID NO: 3595 - DNA, 10 bp, Artificial Sequence
  Synthetic Polynucleotide
agtctgttga

SEQ ID NO: 3596 - DNA, 10 bp, Artificial Sequence
  Synthetic Polynucleotide
tgtgggagag

SEQ ID NO: 3597 - DNA, 10 bp, Artificial Sequence
  Synthetic Polynucleotide
gtagttgtta

SEQ ID NO: 3598 - DNA, 10 bp, Artificial Sequence
  Synthetic Polynucleotide
ttctgaaatg

SEQ ID NO: 3599 - DNA, 10 bp, Artificial Sequence
  Synthetic Polynucleotide
tcaaccaata

SEQ ID NO: 3600 - DNA, 10 bp, Artificial Sequence
  Synthetic Polynucleotide
gaataccgtg

SEQ ID NO: 3601 - DNA, 10 bp, Artificial Sequence
  Synthetic Polynucleotide
cttgtcagtt

SEQ ID NO: 3602 - DNA, 10 bp, Artificial Sequence
  Synthetic Polynucleotide
caatacgcag

SEQ ID NO: 3603 - DNA, 10 bp, Artificial Sequence
  Synthetic Polynucleotide
gaagaccaag

SEQ ID NO: 3604 - DNA, 10 bp, Artificial Sequence
  Synthetic Polynucleotide
tatagagaaa

SEQ ID NO: 3605 - DNA, 10 bp, Artificial Sequence
  Synthetic Polynucleotide
taagaaaatc

SEQ ID NO: 3606 - DNA, 10 bp, Artificial Sequence
  Synthetic Polynucleotide
ttcccaactt

SEQ ID NO: 3607 - DNA, 10 bp, Artificial Sequence
  Synthetic Polynucleotide
taagctgaaa

SEQ ID NO: 3608 - DNA, 10 bp, Artificial Sequence
  Synthetic Polynucleotide
tcctcatcgg

SEQ ID NO: 3609 - DNA, 10 bp, Artificial Sequence
  Synthetic Polynucleotide
atttccatta

SEQ ID NO: 3610 - DNA, 10 bp, Artificial Sequence
  Synthetic Polynucleotide
agaaaattca

SEQ ID NO: 3611 - DNA, 10 bp, Artificial Sequence
  Synthetic Polynucleotide
tccacaatat

SEQ ID NO: 3612 - DNA, 10 bp, Artificial Sequence
  Synthetic Polynucleotide
cttgaaaatt

SEQ ID NO: 3613 - DNA, 10 bp, Artificial Sequence
  Synthetic Polynucleotide
tctctttggg

SEQ ID NO: 3614 - DNA, 10 bp, Artificial Sequence
  Synthetic Polynucleotide
ggtcaggata

SEQ ID NO: 3615 - DNA, 10 bp, Artificial Sequence
  Synthetic Polynucleotide
ttttgttgct

SEQ ID NO: 3616 - DNA, 10 bp, Artificial Sequence
  Synthetic Polynucleotide
tgctttcatt

SEQ ID NO: 3617 - DNA, 10 bp, Artificial Sequence
  Synthetic Polynucleotide
atttcaaatc

SEQ ID NO: 3618 - DNA, 10 bp, Artificial Sequence
  Synthetic Polynucleotide
aatgcttcaa

SEQ ID NO: 3619 - DNA, 10 bp, Artificial Sequence
  Synthetic Polynucleotide
caagggtgtt

SEQ ID NO: 3620 - DNA, 10 bp, Artificial Sequence
  Synthetic Polynucleotide
catacaatgc

SEQ ID NO: 3621 - DNA, 10 bp, Artificial Sequence
  Synthetic Polynucleotide
atgcattcat

SEQ ID NO: 3622 - DNA, 10 bp, Artificial Sequence
  Synthetic Polynucleotide
tgatagatgg

SEQ ID NO: 3623 - DNA, 10 bp, Artificial Sequence
  Synthetic Polynucleotide
gttcttcttc

SEQ ID NO: 3624 - DNA, 10 bp, Artificial Sequence
  Synthetic Polynucleotide
tcatggcaaa

SEQ ID NO: 3625 - DNA, 10 bp, Artificial Sequence
  Synthetic Polynucleotide
tttattattc

SEQ ID NO: 3626 - DNA, 10 bp, Artificial Sequence
  Synthetic Polynucleotide
ggtgaaaaca

SEQ ID NO: 3627 - DNA, 10 bp, Artificial Sequence
  Synthetic Polynucleotide
acataaaagc

SEQ ID NO: 3628 - DNA, 10 bp, Artificial Sequence
  Synthetic Polynucleotide
agagacaact

SEQ ID NO: 3629 - DNA, 10 bp, Artificial Sequence
  Synthetic Polynucleotide
tcttatcgat

SEQ ID NO: 3630 - DNA, 10 bp, Artificial Sequence
  Synthetic Polynucleotide
actgcttgca

SEQ ID NO: 3631 - DNA, 10 bp, Artificial Sequence
  Synthetic Polynucleotide
aatggatggt

SEQ ID NO: 3632 - DNA, 10 bp, Artificial Sequence
  Synthetic Polynucleotide
cctatccaaa

SEQ ID NO: 3633 - DNA, 10 bp, Artificial Sequence
  Synthetic Polynucleotide
agagtctgaa

SEQ ID NO: 3634 - DNA, 10 bp, Artificial Sequence
  Synthetic Polynucleotide
tattattgtt

SEQ ID NO: 3635 - DNA, 10 bp, Artificial Sequence
  Synthetic Polynucleotide
atcagaagat

SEQ ID NO: 3636 - DNA, 10 bp, Artificial Sequence
  Synthetic Polynucleotide
tcaaccattc

SEQ ID NO: 3637 - DNA, 10 bp, Artificial Sequence
  Synthetic Polynucleotide
atgatggaga

SEQ ID NO: 3638 - DNA, 10 bp, Artificial Sequence
  Synthetic Polynucleotide
tgattttcca

SEQ ID NO: 3639 - DNA, 10 bp, Artificial Sequence
  Synthetic Polynucleotide
atcaaaatgc

SEQ ID NO: 3640 - DNA, 10 bp, Artificial Sequence
  Synthetic Polynucleotide
ttatcttttg

SEQ ID NO: 3641 - DNA, 10 bp, Artificial Sequence
  Synthetic Polynucleotide
aagagagaaa

SEQ ID NO: 3642 - DNA, 10 bp, Artificial Sequence
  Synthetic Polynucleotide
attgcttcat

SEQ ID NO: 3643 - DNA, 10 bp, Artificial Sequence
  Synthetic Polynucleotide
caattggaga

SEQ ID NO: 3644 - DNA, 10 bp, Artificial Sequence
  Synthetic Polynucleotide
tcaaggaaag

SEQ ID NO: 3645 - DNA, 10 bp, Artificial Sequence
  Synthetic Polynucleotide
atgtcaatcc

SEQ ID NO: 3646 - DNA, 10 bp, Artificial Sequence
  Synthetic Polynucleotide
actccccgcc

SEQ ID NO: 3647 - DNA, 10 bp, Artificial Sequence
  Synthetic Polynucleotide
caaatgaaaa

SEQ ID NO: 3648 - DNA, 10 bp, Artificial Sequence
  Synthetic Polynucleotide
tttccatgca

SEQ ID NO: 3649 - DNA, 10 bp, Artificial Sequence
  Synthetic Polynucleotide
atagaaggag

SEQ ID NO: 3650 - DNA, 10 bp, Artificial Sequence
  Synthetic Polynucleotide
ggtacattcc

SEQ ID NO: 3651 - DNA, 10 bp, Artificial Sequence
  Synthetic Polynucleotide
ggaaaagctc

SEQ ID NO: 3652 - DNA, 10 bp, Artificial Sequence
  Synthetic Polynucleotide
catcactatg

SEQ ID NO: 3653 - DNA, 10 bp, Artificial Sequence
  Synthetic Polynucleotide
atgaacttgc

SEQ ID NO: 3654 - DNA, 10 bp, Artificial Sequence
  Synthetic Polynucleotide
tccaaacatc

SEQ ID NO: 3655 - DNA, 10 bp, Artificial Sequence
  Synthetic Polynucleotide
gaatgataga

SEQ ID NO: 3656 - DNA, 10 bp, Artificial Sequence
  Synthetic Polynucleotide
ttcttttgac

SEQ ID NO: 3657 - DNA, 10 bp, Artificial Sequence
  Synthetic Polynucleotide
cacattcaca

SEQ ID NO: 3658 - DNA, 10 bp, Artificial Sequence
  Synthetic Polynucleotide
acagttctcc

SEQ ID NO: 3659 - DNA, 10 bp, Artificial Sequence
  Synthetic Polynucleotide
caacatgtct

SEQ ID NO: 3660 - DNA, 10 bp, Artificial Sequence
  Synthetic Polynucleotide
tattctgctc

SEQ ID NO: 3661 - DNA, 10 bp, Artificial Sequence
  Synthetic Polynucleotide
attgaaggaa

SEQ ID NO: 3662 - DNA, 10 bp, Artificial Sequence
  Synthetic Polynucleotide
tgagatttga

SEQ ID NO: 3663 - DNA, 10 bp, Artificial Sequence
  Synthetic Polynucleotide
tgggatcaga

SEQ ID NO: 3664 - DNA, 10 bp, Artificial Sequence
  Synthetic Polynucleotide
aaaaggtttt

SEQ ID NO: 3665 - DNA, 10 bp, Artificial Sequence
  Synthetic Polynucleotide
taaacatgat

SEQ ID NO: 3666 - DNA, 10 bp, Artificial Sequence
  Synthetic Polynucleotide
ttttgatgat

SEQ ID NO: 3667 - DNA, 10 bp, Artificial Sequence
  Synthetic Polynucleotide
gtggtgtaca

SEQ ID NO: 3668 - DNA, 10 bp, Artificial Sequence
  Synthetic Polynucleotide
tcatctctga

SEQ ID NO: 3669 - DNA, 10 bp, Artificial Sequence
  Synthetic Polynucleotide
agcaataaca

SEQ ID NO: 3670 - DNA, 10 bp, Artificial Sequence
  Synthetic Polynucleotide
cactgaagaa

SEQ ID NO: 3671 - DNA, 10 bp, Artificial Sequence
  Synthetic Polynucleotide
cttttgatgt

SEQ ID NO: 3672 - DNA, 10 bp, Artificial Sequence
  Synthetic Polynucleotide
tccaagaaac

SEQ ID NO: 3673 - DNA, 10 bp, Artificial Sequence
  Synthetic Polynucleotide
aggtaataaa

SEQ ID NO: 3674 - DNA, 10 bp, Artificial Sequence
  Synthetic Polynucleotide
tagaaacaag

SEQ ID NO: 3675 - DNA, 10 bp, Artificial Sequence
  Synthetic Polynucleotide
tcctctttat

SEQ ID NO: 3676 - DNA, 10 bp, Artificial Sequence
  Synthetic Polynucleotide
atgcaaacaa

SEQ ID NO: 3677 - DNA, 10 bp, Artificial Sequence
  Synthetic Polynucleotide
cactgaagtt

SEQ ID NO: 3678 - DNA, 10 bp, Artificial Sequence
  Synthetic Polynucleotide
agaccaagaa

SEQ ID NO: 3679 - DNA, 10 bp, Artificial Sequence
  Synthetic Polynucleotide
tcactactct

SEQ ID NO: 3680 - DNA, 10 bp, Artificial Sequence
  Synthetic Polynucleotide
aaaattgtag

SEQ ID NO: 3681 - DNA, 10 bp, Artificial Sequence
  Synthetic Polynucleotide
ccatggcttc

SEQ ID NO: 3682 - DNA, 10 bp, Artificial Sequence
  Synthetic Polynucleotide
cactaatcag

SEQ ID NO: 3683 - DNA, 10 bp, Artificial Sequence
  Synthetic Polynucleotide
agagaaatca

SEQ ID NO: 3684 - DNA, 10 bp, Artificial Sequence
  Synthetic Polynucleotide
tccagaccac

SEQ ID NO: 3685 - DNA, 10 bp, Artificial Sequence
  Synthetic Polynucleotide
gttcttatct

SEQ ID NO: 3686 - DNA, 10 bp, Artificial Sequence
  Synthetic Polynucleotide
ctcccatttt

SEQ ID NO: 3687 - DNA, 10 bp, Artificial Sequence
  Synthetic Polynucleotide
aaaggatgca

SEQ ID NO: 3688 - DNA, 10 bp, Artificial Sequence
  Synthetic Polynucleotide
ggaatagcat

SEQ ID NO: 3689 - DNA, 10 bp, Artificial Sequence
  Synthetic Polynucleotide
gggcgtatat

SEQ ID NO: 3690 - DNA, 10 bp, Artificial Sequence
  Synthetic Polynucleotide
ccacaagatg

SEQ ID NO: 3691 - DNA, 10 bp, Artificial Sequence
  Synthetic Polynucleotide
aaatgtcctc

SEQ ID NO: 3692 - DNA, 10 bp, Artificial Sequence
  Synthetic Polynucleotide
tttattgtac

SEQ ID NO: 3693 - DNA, 10 bp, Artificial Sequence
  Synthetic Polynucleotide
tgagagacca

SEQ ID NO: 3694 - DNA, 10 bp, Artificial Sequence
  Synthetic Polynucleotide
atctgggatt

SEQ ID NO: 3695 - DNA, 10 bp, Artificial Sequence
  Synthetic Polynucleotide
ggagatattc

SEQ ID NO: 3696 - DNA, 10 bp, Artificial Sequence
  Synthetic Polynucleotide
tattgccata

SEQ ID NO: 3697 - DNA, 10 bp, Artificial Sequence
  Synthetic Polynucleotide
taaaacgaaa

SEQ ID NO: 3698 - DNA, 10 bp, Artificial Sequence
  Synthetic Polynucleotide
cacttttaaa

SEQ ID NO: 3699 - DNA, 10 bp, Artificial Sequence
  Synthetic Polynucleotide
aaaacgaaag

SEQ ID NO: 3700 - DNA, 10 bp, Artificial Sequence
  Synthetic Polynucleotide
aagatttcca

SEQ ID NO: 3701 - DNA, 10 bp, Artificial Sequence
  Synthetic Polynucleotide
tagatgatgc

SEQ ID NO: 3702 - DNA, 10 bp, Artificial Sequence
  Synthetic Polynucleotide
tttataccaa

SEQ ID NO: 3703 - DNA, 10 bp, Artificial Sequence
  Synthetic Polynucleotide
gcagccaaaa

SEQ ID NO: 3704 - DNA, 10 bp, Artificial Sequence
  Synthetic Polynucleotide
tgggcatatg

SEQ ID NO: 3705 - DNA, 10 bp, Artificial Sequence
  Synthetic Polynucleotide
taggattttc

SEQ ID NO: 3706 - DNA, 10 bp, Artificial Sequence
  Synthetic Polynucleotide
gatcctaaca

SEQ ID NO: 3707 - DNA, 10 bp, Artificial Sequence
  Synthetic Polynucleotide
ccctcctctt

SEQ ID NO: 3708 - DNA, 10 bp, Artificial Sequence
  Synthetic Polynucleotide
ttaagaaatg

SEQ ID NO: 3709 - DNA, 10 bp, Artificial Sequence
  Synthetic Polynucleotide
caggagtgct

SEQ ID NO: 3710 - DNA, 10 bp, Artificial Sequence
  Synthetic Polynucleotide
ctttgagggg

SEQ ID NO: 3711 - DNA, 10 bp, Artificial Sequence
  Synthetic Polynucleotide
catgcacatc

SEQ ID NO: 3712 - DNA, 10 bp, Artificial Sequence
  Synthetic Polynucleotide
ccactgtcat

SEQ ID NO: 3713 - DNA, 10 bp, Artificial Sequence
  Synthetic Polynucleotide
aaggttccag

SEQ ID NO: 3714 - DNA, 10 bp, Artificial Sequence
  Synthetic Polynucleotide
aaaaggtaac

SEQ ID NO: 3715 - DNA, 10 bp, Artificial Sequence
  Synthetic Polynucleotide
gtatcagggt

SEQ ID NO: 3716 - DNA, 10 bp, Artificial Sequence
  Synthetic Polynucleotide
tatgcagatg

SEQ ID NO: 3717 - DNA, 10 bp, Artificial Sequence
  Synthetic Polynucleotide
ctccagagta

SEQ ID NO: 3718 - DNA, 10 bp, Artificial Sequence
  Synthetic Polynucleotide
aagaagagtg

SEQ ID NO: 3719 - DNA, 10 bp, Artificial Sequence
  Synthetic Polynucleotide
tcatttgagg

SEQ ID NO: 3720 - DNA, 10 bp, Artificial Sequence
  Synthetic Polynucleotide
tggtgcaacc

SEQ ID NO: 3721 - DNA, 10 bp, Artificial Sequence
  Synthetic Polynucleotide
cataatatat

SEQ ID NO: 3722 - DNA, 10 bp, Artificial Sequence
  Synthetic Polynucleotide
ctcaagaagt

SEQ ID NO: 3723 - DNA, 10 bp, Artificial Sequence
  Synthetic Polynucleotide
cctaagtttt

SEQ ID NO: 3724 - DNA, 10 bp, Artificial Sequence
  Synthetic Polynucleotide
tatgatgatg

SEQ ID NO: 3725 - DNA, 10 bp, Artificial Sequence
  Synthetic Polynucleotide
atttgcagtt

SEQ ID NO: 3726 - DNA, 10 bp, Artificial Sequence
  Synthetic Polynucleotide
actcattggg

SEQ ID NO: 3727 - DNA, 10 bp, Artificial Sequence
  Synthetic Polynucleotide
catttatgat

SEQ ID NO: 3728 - DNA, 10 bp, Artificial Sequence
  Synthetic Polynucleotide
tgtattgtga

SEQ ID NO: 3729 - DNA, 10 bp, Artificial Sequence
  Synthetic Polynucleotide
ctctttcttt

SEQ ID NO: 3730 - DNA, 10 bp, Artificial Sequence
  Synthetic Polynucleotide
taaatgacaa

SEQ ID NO: 3731 - DNA, 10 bp, Artificial Sequence
  Synthetic Polynucleotide
tcattgtcca

SEQ ID NO: 3732 - DNA, 10 bp, Artificial Sequence
  Synthetic Polynucleotide
ggattcatct

SEQ ID NO: 3733 - DNA, 10 bp, Artificial Sequence
  Synthetic Polynucleotide
cagcagtcac

SEQ ID NO: 3734 - DNA, 10 bp, Artificial Sequence
  Synthetic Polynucleotide
acaagatgga

SEQ ID NO: 3735 - DNA, 10 bp, Artificial Sequence
  Synthetic Polynucleotide
tgatagtctc

SEQ ID NO: 3736 - DNA, 10 bp, Artificial Sequence
  Synthetic Polynucleotide
tttgagtgga

SEQ ID NO: 3737 - DNA, 10 bp, Artificial Sequence
  Synthetic Polynucleotide
ttcccattaa

SEQ ID NO: 3738 - DNA, 10 bp, Artificial Sequence
  Synthetic Polynucleotide
agagtgggat

SEQ ID NO: 3739 - DNA, 10 bp, Artificial Sequence
  Synthetic Polynucleotide
gcttctaatc

SEQ ID NO: 3740 - DNA, 10 bp, Artificial Sequence
  Synthetic Polynucleotide
ggtcaaagaa

SEQ ID NO: 3741 - DNA, 10 bp, Artificial Sequence
  Synthetic Polynucleotide
tgcctcaacc

SEQ ID NO: 3742 - DNA, 10 bp, Artificial Sequence
  Synthetic Polynucleotide
tttgcatgag

SEQ ID NO: 3743 - DNA, 10 bp, Artificial Sequence
  Synthetic Polynucleotide
ttatcccaca

SEQ ID NO: 3744 - DNA, 10 bp, Artificial Sequence
  Synthetic Polynucleotide
acgacagtgc

SEQ ID NO: 3745 - DNA, 10 bp, Artificial Sequence
  Synthetic Polynucleotide
caggaagtca

SEQ ID NO: 3746 - DNA, 10 bp, Artificial Sequence
  Synthetic Polynucleotide
gagttcaagg

SEQ ID NO: 3747 - DNA, 10 bp, Artificial Sequence
  Synthetic Polynucleotide
cgttccattt

SEQ ID NO: 3748 - DNA, 10 bp, Artificial Sequence
  Synthetic Polynucleotide
cgacgaacac

SEQ ID NO: 3749 - DNA, 10 bp, Artificial Sequence
  Synthetic Polynucleotide
agcgaaccaa

SEQ ID NO: 3750 - DNA, 10 bp, Artificial Sequence
  Synthetic Polynucleotide
agataaaaca

SEQ ID NO: 3751 - DNA, 10 bp, Artificial Sequence
  Synthetic Polynucleotide
cacggttggc

SEQ ID NO: 3752 - DNA, 10 bp, Artificial Sequence
  Synthetic Polynucleotide
agctgaacag

SEQ ID NO: 3753 - DNA, 10 bp, Artificial Sequence
  Synthetic Polynucleotide
tccgaagaag

SEQ ID NO: 3754 - DNA, 10 bp, Artificial Sequence
  Synthetic Polynucleotide
accccgtccc

SEQ ID NO: 3755 - DNA, 10 bp, Artificial Sequence
  Synthetic Polynucleotide
agtcaatctt

SEQ ID NO: 3756 - DNA, 10 bp, Artificial Sequence
  Synthetic Polynucleotide
agtaaaattt

SEQ ID NO: 3757 - DNA, 10 bp, Artificial Sequence
  Synthetic Polynucleotide
gtatcaaaac

SEQ ID NO: 3758 - DNA, 10 bp, Artificial Sequence
  Synthetic Polynucleotide
atggttttac

SEQ ID NO: 3759 - DNA, 10 bp, Artificial Sequence
  Synthetic Polynucleotide
ggtatgaggg

SEQ ID NO: 3760 - DNA, 10 bp, Artificial Sequence
  Synthetic Polynucleotide
aatgctgtat

SEQ ID NO: 3761 - DNA, 10 bp, Artificial Sequence
  Synthetic Polynucleotide
aacattgagg

SEQ ID NO: 3762 - DNA, 10 bp, Artificial Sequence
  Synthetic Polynucleotide
aagtcctacc

SEQ ID NO: 3763 - DNA, 10 bp, Artificial Sequence
  Synthetic Polynucleotide
aaaacaaaag

SEQ ID NO: 3764 - DNA, 10 bp, Artificial Sequence
  Synthetic Polynucleotide
ctctcctcca

SEQ ID NO: 3765 - DNA, 10 bp, Artificial Sequence
  Synthetic Polynucleotide
aattttgaat

SEQ ID NO: 3766 - DNA, 10 bp, Artificial Sequence
  Synthetic Polynucleotide
aagtctatcg

SEQ ID NO: 3767 - DNA, 10 bp, Artificial Sequence
  Synthetic Polynucleotide
cagagggaac

SEQ ID NO: 3768 - DNA, 10 bp, Artificial Sequence
  Synthetic Polynucleotide
tgacgctcaa

SEQ ID NO: 3769 - DNA, 10 bp, Artificial Sequence
  Synthetic Polynucleotide
cattcctctc

SEQ ID NO: 3770 - DNA, 10 bp, Artificial Sequence
  Synthetic Polynucleotide
ttcaacaagt

SEQ ID NO: 3771 - DNA, 10 bp, Artificial Sequence
  Synthetic Polynucleotide
atttacccgg

SEQ ID NO: 3772 - DNA, 10 bp, Artificial Sequence
  Synthetic Polynucleotide
tttattcttc

SEQ ID NO: 3773 - DNA, 10 bp, Artificial Sequence
  Synthetic Polynucleotide
tctgtttgtt

SEQ ID NO: 3774 - DNA, 10 bp, Artificial Sequence
  Synthetic Polynucleotide
ggttttcgtg

SEQ ID NO: 3775 - DNA, 10 bp, Artificial Sequence
  Synthetic Polynucleotide
gaatcctaca

SEQ ID NO: 3776 - DNA, 10 bp, Artificial Sequence
  Synthetic Polynucleotide
ccaaagacta

SEQ ID NO: 3777 - DNA, 10 bp, Artificial Sequence
  Synthetic Polynucleotide
tctgagatct

SEQ ID NO: 3778 - DNA, 10 bp, Artificial Sequence
  Synthetic Polynucleotide
tttagctctt

SEQ ID NO: 3779 - DNA, 10 bp, Artificial Sequence
  Synthetic Polynucleotide
aacattacag

SEQ ID NO: 3780 - DNA, 10 bp, Artificial Sequence
  Synthetic Polynucleotide
ttgttgatga

SEQ ID NO: 3781 - DNA, 10 bp, Artificial Sequence
  Synthetic Polynucleotide
gcattgcgat

SEQ ID NO: 3782 - DNA, 10 bp, Artificial Sequence
  Synthetic Polynucleotide
ttaaatggaa

SEQ ID NO: 3783 - DNA, 10 bp, Artificial Sequence
  Synthetic Polynucleotide
aaaatacact

SEQ ID NO: 3784 - DNA, 10 bp, Artificial Sequence
  Synthetic Polynucleotide
agtcttccgt

SEQ ID NO: 3785 - DNA, 10 bp, Artificial Sequence
  Synthetic Polynucleotide
caagtcaagc

SEQ ID NO: 3786 - DNA, 10 bp, Artificial Sequence
  Synthetic Polynucleotide
catcatccca

SEQ ID NO: 3787 - DNA, 10 bp, Artificial Sequence
  Synthetic Polynucleotide
caatcgtcct

SEQ ID NO: 3788 - DNA, 10 bp, Artificial Sequence
  Synthetic Polynucleotide
taaaacataa

SEQ ID NO: 3789 - DNA, 10 bp, Artificial Sequence
  Synthetic Polynucleotide
tcaataaata

SEQ ID NO: 3790 - DNA, 10 bp, Artificial Sequence
  Synthetic Polynucleotide
tttgtgcatt

SEQ ID NO: 3791 - DNA, 10 bp, Artificial Sequence
  Synthetic Polynucleotide
aaagaaaata

SEQ ID NO: 3792 - DNA, 10 bp, Artificial Sequence
  Synthetic Polynucleotide
cctgtctgag

SEQ ID NO: 3793 - DNA, 10 bp, Artificial Sequence
  Synthetic Polynucleotide
tgtactccaa

SEQ ID NO: 3794 - DNA, 10 bp, Artificial Sequence
  Synthetic Polynucleotide
cttcttcaac

SEQ ID NO: 3795 - DNA, 10 bp, Artificial Sequence
  Synthetic Polynucleotide
aaccaacacc

SEQ ID NO: 3796 - DNA, 10 bp, Artificial Sequence
  Synthetic Polynucleotide
tgcttgtact

SEQ ID NO: 3797 - DNA, 10 bp, Artificial Sequence
  Synthetic Polynucleotide
aatacatttg

SEQ ID NO: 3798 - DNA, 10 bp, Artificial Sequence
  Synthetic Polynucleotide
ttgccaacac

SEQ ID NO: 3799 - DNA, 10 bp, Artificial Sequence
  Synthetic Polynucleotide
cacgacaaag

SEQ ID NO: 3800 - DNA, 10 bp, Artificial Sequence
  Synthetic Polynucleotide
ctttatccga

SEQ ID NO: 3801 - DNA, 10 bp, Artificial Sequence
  Synthetic Polynucleotide
aaaatcttcc

SEQ ID NO: 3802 - DNA, 10 bp, Artificial Sequence
  Synthetic Polynucleotide
tcctgcttct

SEQ ID NO: 3803 - DNA, 10 bp, Artificial Sequence
  Synthetic Polynucleotide
aaatgctgat

SEQ ID NO: 3804 - DNA, 10 bp, Artificial Sequence
  Synthetic Polynucleotide
ttttgaagtg

SEQ ID NO: 3805 - DNA, 10 bp, Artificial Sequence
  Synthetic Polynucleotide
tataataaga

SEQ ID NO: 3806 - DNA, 10 bp, Artificial Sequence
  Synthetic Polynucleotide
tctgaataat

SEQ ID NO: 3807 - DNA, 10 bp, Artificial Sequence
  Synthetic Polynucleotide
atattatact

SEQ ID NO: 3808 - DNA, 10 bp, Artificial Sequence
  Synthetic Polynucleotide
ccaaagtagt

SEQ ID NO: 3809 - DNA, 10 bp, Artificial Sequence
  Synthetic Polynucleotide
tccggcccct

SEQ ID NO: 3810 - DNA, 10 bp, Artificial Sequence
  Synthetic Polynucleotide
agtgatctgt

SEQ ID NO: 3811 - DNA, 10 bp, Artificial Sequence
  Synthetic Polynucleotide
tcctctcctt

SEQ ID NO: 3812 - DNA, 10 bp, Artificial Sequence
  Synthetic Polynucleotide
tagacgtttt

SEQ ID NO: 3813 - DNA, 10 bp, Artificial Sequence
  Synthetic Polynucleotide
aaggatgccc

SEQ ID NO: 3814 - DNA, 10 bp, Artificial Sequence
  Synthetic Polynucleotide
gaaaagtcaa

SEQ ID NO: 3815 - DNA, 10 bp, Artificial Sequence
  Synthetic Polynucleotide
tgttatggag

SEQ ID NO: 3816 - DNA, 10 bp, Artificial Sequence
  Synthetic Polynucleotide
aaatccattt

SEQ ID NO: 3817 - DNA, 10 bp, Artificial Sequence
  Synthetic Polynucleotide
tgaaagatga

SEQ ID NO: 3818 - DNA, 10 bp, Artificial Sequence
  Synthetic Polynucleotide
cttctaagtt

SEQ ID NO: 3819 - DNA, 10 bp, Artificial Sequence
  Synthetic Polynucleotide
ttgtacccac

SEQ ID NO: 3820 - DNA, 10 bp, Artificial Sequence
  Synthetic Polynucleotide
agagccagtc

SEQ ID NO: 3821 - DNA, 10 bp, Artificial Sequence
  Synthetic Polynucleotide
tgaaacctct

SEQ ID NO: 3822 - DNA, 10 bp, Artificial Sequence
  Synthetic Polynucleotide
agaacaaaac

SEQ ID NO: 3823 - DNA, 10 bp, Artificial Sequence
  Synthetic Polynucleotide
ctgatgttga

SEQ ID NO: 3824 - DNA, 10 bp, Artificial Sequence
  Synthetic Polynucleotide
ctgaaacaca

SEQ ID NO: 3825 - DNA, 10 bp, Artificial Sequence
  Synthetic Polynucleotide
tgacaaagat

SEQ ID NO: 3826 - DNA, 10 bp, Artificial Sequence
  Synthetic Polynucleotide
catgttcttg

SEQ ID NO: 3827 - DNA, 10 bp, Artificial Sequence
  Synthetic Polynucleotide
tatggtgatg

SEQ ID NO: 3828 - DNA, 10 bp, Artificial Sequence
  Synthetic Polynucleotide
tagacaatta

SEQ ID NO: 3829 - DNA, 10 bp, Artificial Sequence
  Synthetic Polynucleotide
cctggtaaca

SEQ ID NO: 3830 - DNA, 10 bp, Artificial Sequence
  Synthetic Polynucleotide
tccaaatcca

SEQ ID NO: 3831 - DNA, 10 bp, Artificial Sequence
  Synthetic Polynucleotide
ccatggcaag

SEQ ID NO: 3832 - DNA, 10 bp, Artificial Sequence
  Synthetic Polynucleotide
tatcacttgg

SEQ ID NO: 3833 - DNA, 10 bp, Artificial Sequence
  Synthetic Polynucleotide
tacatctctt

SEQ ID NO: 3834 - DNA, 10 bp, Artificial Sequence
  Synthetic Polynucleotide
ttcaaatttt

SEQ ID NO: 3835 - DNA, 10 bp, Artificial Sequence
  Synthetic Polynucleotide
atgatgttga

SEQ ID NO: 3836 - DNA, 10 bp, Artificial Sequence
  Synthetic Polynucleotide
gtgtatgatt

SEQ ID NO: 3837 - DNA, 10 bp, Artificial Sequence
  Synthetic Polynucleotide
aaactgaaaa

SEQ ID NO: 3838 - DNA, 10 bp, Artificial Sequence
  Synthetic Polynucleotide
tctcacgggc

SEQ ID NO: 3839 - DNA, 10 bp, Artificial Sequence
  Synthetic Polynucleotide
ttggtgctgg

SEQ ID NO: 3840 - DNA, 10 bp, Artificial Sequence
  Synthetic Polynucleotide
gagcatgtct

SEQ ID NO: 3841 - DNA, 10 bp, Artificial Sequence
  Synthetic Polynucleotide
agtatcagca

SEQ ID NO: 3842 - DNA, 10 bp, Artificial Sequence
  Synthetic Polynucleotide
gtctcggtgt

SEQ ID NO: 3843 - DNA, 10 bp, Artificial Sequence
  Synthetic Polynucleotide
caagcagatg

SEQ ID NO: 3844 - DNA, 10 bp, Artificial Sequence
  Synthetic Polynucleotide
tttaatatct

SEQ ID NO: 3845 - DNA, 10 bp, Artificial Sequence
  Synthetic Polynucleotide
ttgataaaga

SEQ ID NO: 3846 - DNA, 10 bp, Artificial Sequence
  Synthetic Polynucleotide
ttcttcttgg

SEQ ID NO: 3847 - DNA, 10 bp, Artificial Sequence
  Synthetic Polynucleotide
ttatctctgg

SEQ ID NO: 3848 - DNA, 10 bp, Artificial Sequence
  Synthetic Polynucleotide
ttgccgccgt

SEQ ID NO: 3849 - DNA, 10 bp, Artificial Sequence
  Synthetic Polynucleotide
gaaggcatgg

SEQ ID NO: 3850 - DNA, 10 bp, Artificial Sequence
  Synthetic Polynucleotide
aaaataaggg

SEQ ID NO: 3851 - DNA, 10 bp, Artificial Sequence
  Synthetic Polynucleotide
tctttgaaga

SEQ ID NO: 3852 - DNA, 10 bp, Artificial Sequence
  Synthetic Polynucleotide
ttagcctctt

SEQ ID NO: 3853 - DNA, 10 bp, Artificial Sequence
  Synthetic Polynucleotide
aaagaaagaa

SEQ ID NO: 3854 - DNA, 10 bp, Artificial Sequence
  Synthetic Polynucleotide
aggaagttca

SEQ ID NO: 3855 - DNA, 10 bp, Artificial Sequence
  Synthetic Polynucleotide
aaccaagcaa

SEQ ID NO: 3856 - DNA, 10 bp, Artificial Sequence
  Synthetic Polynucleotide
atgtgacgga

SEQ ID NO: 3857 - DNA, 10 bp, Artificial Sequence
  Synthetic Polynucleotide
tgaaattgat

SEQ ID NO: 3858 - DNA, 10 bp, Artificial Sequence
  Synthetic Polynucleotide
cttaaggtct

SEQ ID NO: 3859 - DNA, 10 bp, Artificial Sequence
  Synthetic Polynucleotide
gaagggtgca

SEQ ID NO: 3860 - DNA, 10 bp, Artificial Sequence
  Synthetic Polynucleotide
caggtcttga

SEQ ID NO: 3861 - DNA, 10 bp, Artificial Sequence
  Synthetic Polynucleotide
gctgacgcct

SEQ ID NO: 3862 - DNA, 10 bp, Artificial Sequence
  Synthetic Polynucleotide
ttgaagatga

SEQ ID NO: 3863 - DNA, 10 bp, Artificial Sequence
  Synthetic Polynucleotide
ttaaccatat

SEQ ID NO: 3864 - DNA, 10 bp, Artificial Sequence
  Synthetic Polynucleotide
ggcttatcca

SEQ ID NO: 3865 - DNA, 10 bp, Artificial Sequence
  Synthetic Polynucleotide
gctctttccg

SEQ ID NO: 3866 - DNA, 10 bp, Artificial Sequence
  Synthetic Polynucleotide
tctctattaa

SEQ ID NO: 3867 - DNA, 10 bp, Artificial Sequence
  Synthetic Polynucleotide
atgagtggga

SEQ ID NO: 3868 - DNA, 10 bp, Artificial Sequence
  Synthetic Polynucleotide
tggctgtggt

SEQ ID NO: 3869 - DNA, 10 bp, Artificial Sequence
  Synthetic Polynucleotide
tatatagcta

SEQ ID NO: 3870 - DNA, 10 bp, Artificial Sequence
  Synthetic Polynucleotide
tatcttaaag

SEQ ID NO: 3871 - DNA, 10 bp, Artificial Sequence
  Synthetic Polynucleotide
tgtggcgggt

SEQ ID NO: 3872 - DNA, 10 bp, Artificial Sequence
  Synthetic Polynucleotide
ataataataa

SEQ ID NO: 3873 - DNA, 10 bp, Artificial Sequence
  Synthetic Polynucleotide
tattattatt

SEQ ID NO: 3874 - DNA, 10 bp, Artificial Sequence
  Synthetic Polynucleotide
ttatatttat

SEQ ID NO: 3875 - DNA, 10 bp, Artificial Sequence
  Synthetic Polynucleotide
ttatatataa

SEQ ID NO: 3876 - DNA, 10 bp, Artificial Sequence
  Synthetic Polynucleotide
aattaaataa

SEQ ID NO: 3877 - DNA, 10 bp, Artificial Sequence
  Synthetic Polynucleotide
ttattatttt

SEQ ID NO: 3878 - DNA, 10 bp, Artificial Sequence
  Synthetic Polynucleotide
aaattatttt

SEQ ID NO: 3879 - DNA, 10 bp, Artificial Sequence
  Synthetic Polynucleotide
atttatttat

SEQ ID NO: 3880 - DNA, 10 bp, Artificial Sequence
  Synthetic Polynucleotide
atagcaatat

SEQ ID NO: 3881 - DNA, 10 bp, Artificial Sequence
  Synthetic Polynucleotide
ataactcttt

SEQ ID NO: 3882 - DNA, 10 bp, Artificial Sequence
  Synthetic Polynucleotide
atcatcatta

SEQ ID NO: 3883 - DNA, 10 bp, Artificial Sequence
  Synthetic Polynucleotide
ttattacttt

SEQ ID NO: 3884 - DNA, 10 bp, Artificial Sequence
  Synthetic Polynucleotide
aaaatataaa

SEQ ID NO: 3885 - DNA, 10 bp, Artificial Sequence
  Synthetic Polynucleotide
aaattaaata

SEQ ID NO: 3886 - DNA, 10 bp, Artificial Sequence
  Synthetic Polynucleotide
tattgaaata

SEQ ID NO: 3887 - DNA, 10 bp, Artificial Sequence
  Synthetic Polynucleotide
tattttattt

SEQ ID NO: 3888 - DNA, 10 bp, Artificial Sequence
  Synthetic Polynucleotide
aaatcaacaa

SEQ ID NO: 3889 - DNA, 10 bp, Artificial Sequence
  Synthetic Polynucleotide
actgcgaaga

SEQ ID NO: 3890 - DNA, 10 bp, Artificial Sequence
  Synthetic Polynucleotide
tgttttattt

SEQ ID NO: 3891 - DNA, 10 bp, Artificial Sequence
  Synthetic Polynucleotide
aaacaaaaca

SEQ ID NO: 3892 - DNA, 10 bp, Artificial Sequence
  Synthetic Polynucleotide
attgtcacgc

SEQ ID NO: 3893 - DNA, 10 bp, Artificial Sequence
  Synthetic Polynucleotide
aaataaatgt

SEQ ID NO: 3894 - DNA, 10 bp, Artificial Sequence
  Synthetic Polynucleotide
gctttattga

SEQ ID NO: 3895 - DNA, 10 bp, Artificial Sequence
  Synthetic Polynucleotide
ttattttaaa

SEQ ID NO: 3896 - DNA, 10 bp, Artificial Sequence
  Synthetic Polynucleotide
aactctttaa

SEQ ID NO: 3897 - DNA, 10 bp, Artificial Sequence
  Synthetic Polynucleotide
atccaacgag

SEQ ID NO: 3898 - DNA, 10 bp, Artificial Sequence
  Synthetic Polynucleotide
aatgtaaaca

SEQ ID NO: 3899 - DNA, 10 bp, Artificial Sequence
  Synthetic Polynucleotide
attctttcgt

SEQ ID NO: 3900 - DNA, 10 bp, Artificial Sequence
  Synthetic Polynucleotide
tacagtcagt

SEQ ID NO: 3901 - DNA, 10 bp, Artificial Sequence
  Synthetic Polynucleotide
tgagctgtag

SEQ ID NO: 3902 - DNA, 10 bp, Artificial Sequence
  Synthetic Polynucleotide
gtgtggcagg

SEQ ID NO: 3903 - DNA, 10 bp, Artificial Sequence
  Synthetic Polynucleotide
ttatatatct

SEQ ID NO: 3904 - DNA, 10 bp, Artificial Sequence
  Synthetic Polynucleotide
ttgttttctt

SEQ ID NO: 3905 - DNA, 10 bp, Artificial Sequence
  Synthetic Polynucleotide
aaaataaatt

SEQ ID NO: 3906 - DNA, 10 bp, Artificial Sequence
  Synthetic Polynucleotide
agtaggtata

SEQ ID NO: 3907 - DNA, 10 bp, Artificial Sequence
  Synthetic Polynucleotide
attatcagaa

SEQ ID NO: 3908 - DNA, 10 bp, Artificial Sequence
  Synthetic Polynucleotide
ttaccattaa

SEQ ID NO: 3909 - DNA, 10 bp, Artificial Sequence
  Synthetic Polynucleotide
taaaatatat

SEQ ID NO: 3910 - DNA, 10 bp, Artificial Sequence
  Synthetic Polynucleotide
acaaacatgt

SEQ ID NO: 3911 - DNA, 10 bp, Artificial Sequence
  Synthetic Polynucleotide
aagttgaaat

SEQ ID NO: 3912 - DNA, 10 bp, Artificial Sequence
  Synthetic Polynucleotide
ttctgaagaa

SEQ ID NO: 3913 - DNA, 10 bp, Artificial Sequence
  Synthetic Polynucleotide
cgttgcttgg

SEQ ID NO: 3914 - DNA, 10 bp, Artificial Sequence
  Synthetic Polynucleotide
accagaacca

SEQ ID NO: 3915 - DNA, 10 bp, Artificial Sequence
  Synthetic Polynucleotide
aagattttca

SEQ ID NO: 3916 - DNA, 10 bp, Artificial Sequence
  Synthetic Polynucleotide
attcattgaa

SEQ ID NO: 3917 - DNA, 10 bp, Artificial Sequence
  Synthetic Polynucleotide
tataaaatac

SEQ ID NO: 3918 - DNA, 10 bp, Artificial Sequence
  Synthetic Polynucleotide
gcatttagag

SEQ ID NO: 3919 - DNA, 10 bp, Artificial Sequence
  Synthetic Polynucleotide
gcactttgta

SEQ ID NO: 3920 - DNA, 10 bp, Artificial Sequence
  Synthetic Polynucleotide
attattattc

SEQ ID NO: 3921 - DNA, 10 bp, Artificial Sequence
  Synthetic Polynucleotide
ttttatttgt

SEQ ID NO: 3922 - DNA, 10 bp, Artificial Sequence
  Synthetic Polynucleotide
gtttctattt

SEQ ID NO: 3923 - DNA, 10 bp, Artificial Sequence
  Synthetic Polynucleotide
acagtaatta

SEQ ID NO: 3924 - DNA, 10 bp, Artificial Sequence
  Synthetic Polynucleotide
gtcttacaat

SEQ ID NO: 3925 - DNA, 10 bp, Artificial Sequence
  Synthetic Polynucleotide
caagcgtata

SEQ ID NO: 3926 - DNA, 10 bp, Artificial Sequence
  Synthetic Polynucleotide
caagaagaaa

SEQ ID NO: 3927 - DNA, 10 bp, Artificial Sequence
  Synthetic Polynucleotide
ctgcaatcgc

SEQ ID NO: 3928 - DNA, 10 bp, Artificial Sequence
  Synthetic Polynucleotide
gtgttgttta

SEQ ID NO: 3929 - DNA, 10 bp, Artificial Sequence
  Synthetic Polynucleotide
agaatgcacg

SEQ ID NO: 3930 - DNA, 10 bp, Artificial Sequence
  Synthetic Polynucleotide
ttcatccata

SEQ ID NO: 3931 - DNA, 10 bp, Artificial Sequence
  Synthetic Polynucleotide
tgaacattct

SEQ ID NO: 3932 - DNA, 10 bp, Artificial Sequence
  Synthetic Polynucleotide
tctattgttg

SEQ ID NO: 3933 - DNA, 10 bp, Artificial Sequence
  Synthetic Polynucleotide
tggaaacgtg

SEQ ID NO: 3934 - DNA, 10 bp, Artificial Sequence
  Synthetic Polynucleotide
gtagaaatat

SEQ ID NO: 3935 - DNA, 10 bp, Artificial Sequence
  Synthetic Polynucleotide
tgctatagaa

SEQ ID NO: 3936 - DNA, 10 bp, Artificial Sequence
  Synthetic Polynucleotide
tttacgatat

SEQ ID NO: 3937 - DNA, 10 bp, Artificial Sequence
  Synthetic Polynucleotide
agtgagaatg

SEQ ID NO: 3938 - DNA, 10 bp, Artificial Sequence
  Synthetic Polynucleotide
atattatggt

SEQ ID NO: 3939 - DNA, 10 bp, Artificial Sequence
  Synthetic Polynucleotide
acaaactttt

SEQ ID NO: 3940 - DNA, 10 bp, Artificial Sequence
  Synthetic Polynucleotide
tcgtccaacc

SEQ ID NO: 3941 - DNA, 10 bp, Artificial Sequence
  Synthetic Polynucleotide
aatagagtat

SEQ ID NO: 3942 - DNA, 10 bp, Artificial Sequence
  Synthetic Polynucleotide
aaacagtctg

SEQ ID NO: 3943 - DNA, 10 bp, Artificial Sequence
  Synthetic Polynucleotide
gaacaccgac

SEQ ID NO: 3944 - DNA, 10 bp, Artificial Sequence
  Synthetic Polynucleotide
tatcagtgac

SEQ ID NO: 3945 - DNA, 10 bp, Artificial Sequence
  Synthetic Polynucleotide
caatttctga

SEQ ID NO: 3946 - DNA, 10 bp, Artificial Sequence
  Synthetic Polynucleotide
tcggcttata

SEQ ID NO: 3947 - DNA, 10 bp, Artificial Sequence
  Synthetic Polynucleotide
agaagaagat

SEQ ID NO: 3948 - DNA, 10 bp, Artificial Sequence
  Synthetic Polynucleotide
caacctatgg

SEQ ID NO: 3949 - DNA, 10 bp, Artificial Sequence
  Synthetic Polynucleotide
tcttctacct

SEQ ID NO: 3950 - DNA, 10 bp, Artificial Sequence
  Synthetic Polynucleotide
gccatcttct

SEQ ID NO: 3951 - DNA, 10 bp, Artificial Sequence
  Synthetic Polynucleotide
atgtactaca

SEQ ID NO: 3952 - DNA, 10 bp, Artificial Sequence
  Synthetic Polynucleotide
cattttcatc

SEQ ID NO: 3953 - DNA, 10 bp, Artificial Sequence
  Synthetic Polynucleotide
tgtgggaggc

SEQ ID NO: 3954 - DNA, 10 bp, Artificial Sequence
  Synthetic Polynucleotide
aaaagaaaca

SEQ ID NO: 3955 - DNA, 10 bp, Artificial Sequence
  Synthetic Polynucleotide
gaatttaata

SEQ ID NO: 3956 - DNA, 10 bp, Artificial Sequence
  Synthetic Polynucleotide
agtaaatctg

SEQ ID NO: 3957 - DNA, 10 bp, Artificial Sequence
  Synthetic Polynucleotide
tcaccattat

SEQ ID NO: 3958 - DNA, 10 bp, Artificial Sequence
  Synthetic Polynucleotide
acataaacca

SEQ ID NO: 3959 - DNA, 10 bp, Artificial Sequence
  Synthetic Polynucleotide
caccagatgg

SEQ ID NO: 3960 - DNA, 10 bp, Artificial Sequence
  Synthetic Polynucleotide
acatgaacca

SEQ ID NO: 3961 - DNA, 10 bp, Artificial Sequence
  Synthetic Polynucleotide
atgatttcaa

SEQ ID NO: 3962 - DNA, 10 bp, Artificial Sequence
  Synthetic Polynucleotide
gtgtgcctct

SEQ ID NO: 3963 - DNA, 10 bp, Artificial Sequence
  Synthetic Polynucleotide
atgatggatg

SEQ ID NO: 3964 - DNA, 10 bp, Artificial Sequence
  Synthetic Polynucleotide
accagaaaat

SEQ ID NO: 3965 - DNA, 10 bp, Artificial Sequence
  Synthetic Polynucleotide
acaacgaaca

SEQ ID NO: 3966 - DNA, 10 bp, Artificial Sequence
  Synthetic Polynucleotide
gctttcatct

SEQ ID NO: 3967 - DNA, 10 bp, Artificial Sequence
  Synthetic Polynucleotide
accaaaccat

SEQ ID NO: 3968 - DNA, 10 bp, Artificial Sequence
  Synthetic Polynucleotide
aagctccata

SEQ ID NO: 3969 - DNA, 10 bp, Artificial Sequence
  Synthetic Polynucleotide
ctgctgtgaa

SEQ ID NO: 3970 - DNA, 10 bp, Artificial Sequence
  Synthetic Polynucleotide
cacaaagtac

SEQ ID NO: 3971 - DNA, 10 bp, Artificial Sequence
  Synthetic Polynucleotide
ttaaaatcat

SEQ ID NO: 3972 - DNA, 10 bp, Artificial Sequence
  Synthetic Polynucleotide
tggaatggtt

SEQ ID NO: 3973 - DNA, 10 bp, Artificial Sequence
  Synthetic Polynucleotide
tgtgtacaaa

SEQ ID NO: 3974 - DNA, 10 bp, Artificial Sequence
  Synthetic Polynucleotide
tgcatagaaa

SEQ ID NO: 3975 - DNA, 10 bp, Artificial Sequence
  Synthetic Polynucleotide
gggaataaca

SEQ ID NO: 3976 - DNA, 10 bp, Artificial Sequence
  Synthetic Polynucleotide
ctgtcgaatt

SEQ ID NO: 3977 - DNA, 10 bp, Artificial Sequence
  Synthetic Polynucleotide
ttgagaatgc

SEQ ID NO: 3978 - DNA, 10 bp, Artificial Sequence
  Synthetic Polynucleotide
tgtcatcaac

SEQ ID NO: 3979 - DNA, 10 bp, Artificial Sequence
  Synthetic Polynucleotide
aagatgatga

SEQ ID NO: 3980 - DNA, 10 bp, Artificial Sequence
  Synthetic Polynucleotide
cttccaccac

SEQ ID NO: 3981 - DNA, 10 bp, Artificial Sequence
  Synthetic Polynucleotide
aagctcgtta

SEQ ID NO: 3982 - DNA, 10 bp, Artificial Sequence
  Synthetic Polynucleotide
caccagatcg

SEQ ID NO: 3983 - DNA, 10 bp, Artificial Sequence
  Synthetic Polynucleotide
aaacacgctt

SEQ ID NO: 3984 - DNA, 10 bp, Artificial Sequence
  Synthetic Polynucleotide
attttatttt

SEQ ID NO: 3985 - DNA, 10 bp, Artificial Sequence
  Synthetic Polynucleotide
aaaataatat

SEQ ID NO: 3986 - DNA, 10 bp, Artificial Sequence
  Synthetic Polynucleotide
agtagttcca

SEQ ID NO: 3987 - DNA, 10 bp, Artificial Sequence
  Synthetic Polynucleotide
gaaaatgaaa

SEQ ID NO: 3988 - DNA, 10 bp, Artificial Sequence
  Synthetic Polynucleotide
aaataattat

SEQ ID NO: 3989 - DNA, 10 bp, Artificial Sequence
  Synthetic Polynucleotide
aatataaatc

SEQ ID NO: 3990 - DNA, 10 bp, Artificial Sequence
  Synthetic Polynucleotide
catcattgaa

SEQ ID NO: 3991 - DNA, 10 bp, Artificial Sequence
  Synthetic Polynucleotide
tacttaatct

SEQ ID NO: 3992 - DNA, 10 bp, Artificial Sequence
  Synthetic Polynucleotide
tgaataattg

SEQ ID NO: 3993 - DNA, 10 bp, Artificial Sequence
  Synthetic Polynucleotide
cccactattg

SEQ ID NO: 3994 - DNA, 10 bp, Artificial Sequence
  Synthetic Polynucleotide
agcatattca

SEQ ID NO: 3995 - DNA, 10 bp, Artificial Sequence
  Synthetic Polynucleotide
atgttatcaa

SEQ ID NO: 3996 - DNA, 10 bp, Artificial Sequence
  Synthetic Polynucleotide
aaatattcat

SEQ ID NO: 3997 - DNA, 10 bp, Artificial Sequence
  Synthetic Polynucleotide
attaattaat

SEQ ID NO: 3998 - DNA, 10 bp, Artificial Sequence
  Synthetic Polynucleotide
atgtagtcca

SEQ ID NO: 3999 - DNA, 10 bp, Artificial Sequence
  Synthetic Polynucleotide
cacagatagt

SEQ ID NO: 4000 - DNA, 10 bp, Artificial Sequence
  Synthetic Polynucleotide
ttccatcaac

SEQ ID NO: 4001 - DNA, 10 bp, Artificial Sequence
  Synthetic Polynucleotide
tcattttaaa

SEQ ID NO: 4002 - DNA, 10 bp, Artificial Sequence
  Synthetic Polynucleotide
atcatcatct

SEQ ID NO: 4003 - DNA, 10 bp, Artificial Sequence
  Synthetic Polynucleotide
accatgagag

SEQ ID NO: 4004 - DNA, 10 bp, Artificial Sequence
  Synthetic Polynucleotide
taactcatca

SEQ ID NO: 4005 - DNA, 10 bp, Artificial Sequence
  Synthetic Polynucleotide
tagaatttga

SEQ ID NO: 4006 - DNA, 10 bp, Artificial Sequence
  Synthetic Polynucleotide
atctggtgaa

SEQ ID NO: 4007 - DNA, 10 bp, Artificial Sequence
  Synthetic Polynucleotide
tgatgtctct

SEQ ID NO: 4008 - DNA, 10 bp, Artificial Sequence
  Synthetic Polynucleotide
gaaatatctt

SEQ ID NO: 4009 - DNA, 10 bp, Artificial Sequence
  Synthetic Polynucleotide
atcatttatt

SEQ ID NO: 4010 - DNA, 10 bp, Artificial Sequence
  Synthetic Polynucleotide
ttggtcagac

SEQ ID NO: 4011 - DNA, 10 bp, Artificial Sequence
  Synthetic Polynucleotide
tgagataatc

SEQ ID NO: 4012 - DNA, 10 bp, Artificial Sequence
  Synthetic Polynucleotide
agtaagtatc

SEQ ID NO: 4013 - DNA, 10 bp, Artificial Sequence
  Synthetic Polynucleotide
tttcaatatt

SEQ ID NO: 4014 - DNA, 10 bp, Artificial Sequence
  Synthetic Polynucleotide
aatttcttca

SEQ ID NO: 4015 - DNA, 10 bp, Artificial Sequence
  Synthetic Polynucleotide
aatcatattt

SEQ ID NO: 4016 - DNA, 10 bp, Artificial Sequence
  Synthetic Polynucleotide
tgttcaattt

SEQ ID NO: 4017 - DNA, 10 bp, Artificial Sequence
  Synthetic Polynucleotide
cgtattttcc

SEQ ID NO: 4018 - DNA, 10 bp, Artificial Sequence
  Synthetic Polynucleotide
aacatcatca

SEQ ID NO: 4019 - DNA, 10 bp, Artificial Sequence
  Synthetic Polynucleotide
acgtagagag

SEQ ID NO: 4020 - DNA, 10 bp, Artificial Sequence
  Synthetic Polynucleotide
aatatgagaa

SEQ ID NO: 4021 - DNA, 10 bp, Artificial Sequence
  Synthetic Polynucleotide
aaattattga

SEQ ID NO: 4022 - DNA, 10 bp, Artificial Sequence
  Synthetic Polynucleotide
tcttcatata

SEQ ID NO: 4023 - DNA, 10 bp, Artificial Sequence
  Synthetic Polynucleotide
taaagaaaca

SEQ ID NO: 4024 - DNA, 10 bp, Artificial Sequence
  Synthetic Polynucleotide
atttagattc

SEQ ID NO: 4025 - DNA, 10 bp, Artificial Sequence
  Synthetic Polynucleotide
tggaaaggtt

SEQ ID NO: 4026 - DNA, 10 bp, Artificial Sequence
  Synthetic Polynucleotide
aacatcataa

SEQ ID NO: 4027 - DNA, 10 bp, Artificial Sequence
  Synthetic Polynucleotide
tcactatgga

SEQ ID NO: 4028 - DNA, 10 bp, Artificial Sequence
  Synthetic Polynucleotide
taatgttgtc

SEQ ID NO: 4029 - DNA, 10 bp, Artificial Sequence
  Synthetic Polynucleotide
aacatcaact

SEQ ID NO: 4030 - DNA, 10 bp, Artificial Sequence
  Synthetic Polynucleotide
ttgaaattca

SEQ ID NO: 4031 - DNA, 10 bp, Artificial Sequence
  Synthetic Polynucleotide
gacaaaagtg

SEQ ID NO: 4032 - DNA, 10 bp, Artificial Sequence
  Synthetic Polynucleotide
ccccattgta

SEQ ID NO: 4033 - DNA, 10 bp, Artificial Sequence
  Synthetic Polynucleotide
tcgtgagatg

SEQ ID NO: 4034 - DNA, 10 bp, Artificial Sequence
  Synthetic Polynucleotide
acatccaatt

SEQ ID NO: 4035 - DNA, 10 bp, Artificial Sequence
  Synthetic Polynucleotide
caagactccc

SEQ ID NO: 4036 - DNA, 10 bp, Artificial Sequence
  Synthetic Polynucleotide
ttaataatat

SEQ ID NO: 4037 - DNA, 10 bp, Artificial Sequence
  Synthetic Polynucleotide
tagctaatat

SEQ ID NO: 4038 - DNA, 10 bp, Artificial Sequence
  Synthetic Polynucleotide
catcatattg

SEQ ID NO: 4039 - DNA, 10 bp, Artificial Sequence
  Synthetic Polynucleotide
agattttatg

SEQ ID NO: 4040 - DNA, 10 bp, Artificial Sequence
  Synthetic Polynucleotide
cttcattatc

SEQ ID NO: 4041 - DNA, 10 bp, Artificial Sequence
  Synthetic Polynucleotide
catcatgcta

SEQ ID NO: 4042 - DNA, 10 bp, Artificial Sequence
  Synthetic Polynucleotide
ccatcctgcc

SEQ ID NO: 4043 - DNA, 10 bp, Artificial Sequence
  Synthetic Polynucleotide
atatatgtct

SEQ ID NO: 4044 - DNA, 10 bp, Artificial Sequence
  Synthetic Polynucleotide
catcatcaat

SEQ ID NO: 4045 - DNA, 10 bp, Artificial Sequence
  Synthetic Polynucleotide
ctataaagct

SEQ ID NO: 4046 - DNA, 10 bp, Artificial Sequence
  Synthetic Polynucleotide
cagcggagac

SEQ ID NO: 4047 - DNA, 10 bp, Artificial Sequence
  Synthetic Polynucleotide
actttggtca

SEQ ID NO: 4048 - DNA, 10 bp, Artificial Sequence
  Synthetic Polynucleotide
tgaattatct

SEQ ID NO: 4049 - DNA, 10 bp, Artificial Sequence
  Synthetic Polynucleotide
ttaatgaaat

SEQ ID NO: 4050 - DNA, 10 bp, Artificial Sequence
  Synthetic Polynucleotide
ccccgacgat

SEQ ID NO: 4051 - DNA, 10 bp, Artificial Sequence
  Synthetic Polynucleotide
tttacaattg

SEQ ID NO: 4052 - DNA, 10 bp, Artificial Sequence
  Synthetic Polynucleotide
cttctatttt

SEQ ID NO: 4053 - DNA, 10 bp, Artificial Sequence
  Synthetic Polynucleotide
aatttaatca

SEQ ID NO: 4054 - DNA, 10 bp, Artificial Sequence
  Synthetic Polynucleotide
gatatccttc

SEQ ID NO: 4055 - DNA, 10 bp, Artificial Sequence
  Synthetic Polynucleotide
atcgttttgg

SEQ ID NO: 4056 - DNA, 10 bp, Artificial Sequence
  Synthetic Polynucleotide
tgttattctc

SEQ ID NO: 4057 - DNA, 10 bp, Artificial Sequence
  Synthetic Polynucleotide
gctcattgac

SEQ ID NO: 4058 - DNA, 10 bp, Artificial Sequence
  Synthetic Polynucleotide
ttttgtccat

SEQ ID NO: 4059 - DNA, 10 bp, Artificial Sequence
  Synthetic Polynucleotide
aatatgttat

SEQ ID NO: 4060 - DNA, 10 bp, Artificial Sequence
  Synthetic Polynucleotide
tcatcatttc

SEQ ID NO: 4061 - DNA, 10 bp, Artificial Sequence
  Synthetic Polynucleotide
tcacatgttg

SEQ ID NO: 4062 - DNA, 10 bp, Artificial Sequence
  Synthetic Polynucleotide
agataggcgc

SEQ ID NO: 4063 - DNA, 10 bp, Artificial Sequence
  Synthetic Polynucleotide
caattttaag

SEQ ID NO: 4064 - DNA, 10 bp, Artificial Sequence
  Synthetic Polynucleotide
ttcgaagtga

SEQ ID NO: 4065 - DNA, 10 bp, Artificial Sequence
  Synthetic Polynucleotide
tgccacccct

SEQ ID NO: 4066 - DNA, 10 bp, Artificial Sequence
  Synthetic Polynucleotide
taattctttt

SEQ ID NO: 4067 - DNA, 10 bp, Artificial Sequence
  Synthetic Polynucleotide
ttttatcaaa

SEQ ID NO: 4068 - DNA, 10 bp, Artificial Sequence
  Synthetic Polynucleotide
accaactaag

SEQ ID NO: 4069 - DNA, 10 bp, Artificial Sequence
  Synthetic Polynucleotide
atccatacga

SEQ ID NO: 4070 - DNA, 10 bp, Artificial Sequence
  Synthetic Polynucleotide
tagccttaag

SEQ ID NO: 4071 - DNA, 10 bp, Artificial Sequence
  Synthetic Polynucleotide
ttgctaagaa

SEQ ID NO: 4072 - DNA, 10 bp, Artificial Sequence
  Synthetic Polynucleotide
atcaatagag

SEQ ID NO: 4073 - DNA, 10 bp, Artificial Sequence
  Synthetic Polynucleotide
tagattacta

SEQ ID NO: 4074 - DNA, 10 bp, Artificial Sequence
  Synthetic Polynucleotide
aggcaattgg

SEQ ID NO: 4075 - DNA, 10 bp, Artificial Sequence
  Synthetic Polynucleotide
ttcatattat

SEQ ID NO: 4076 - DNA, 10 bp, Artificial Sequence
  Synthetic Polynucleotide
taccctctac

SEQ ID NO: 4077 - DNA, 10 bp, Artificial Sequence
  Synthetic Polynucleotide
gttggaaatc

SEQ ID NO: 4078 - DNA, 10 bp, Artificial Sequence
  Synthetic Polynucleotide
ggtgaaaggc

SEQ ID NO: 4079 - DNA, 10 bp, Artificial Sequence
  Synthetic Polynucleotide
ttcgtccatt

SEQ ID NO: 4080 - DNA, 10 bp, Artificial Sequence
  Synthetic Polynucleotide
ctgaaagttt

SEQ ID NO: 4081 - DNA, 10 bp, Artificial Sequence
  Synthetic Polynucleotide
tcgtgaaagc

SEQ ID NO: 4082 - DNA, 10 bp, Artificial Sequence
  Synthetic Polynucleotide
cttcttgaaa

SEQ ID NO: 4083 - DNA, 10 bp, Artificial Sequence
  Synthetic Polynucleotide
catttaaaga

SEQ ID NO: 4084 - DNA, 10 bp, Artificial Sequence
  Synthetic Polynucleotide
ggagtacgca

SEQ ID NO: 4085 - DNA, 10 bp, Artificial Sequence
  Synthetic Polynucleotide
gttcattctg

SEQ ID NO: 4086 - DNA, 10 bp, Artificial Sequence
  Synthetic Polynucleotide
tgtagtccag

SEQ ID NO: 4087 - DNA, 10 bp, Artificial Sequence
  Synthetic Polynucleotide
tttgaagaga

SEQ ID NO: 4088 - DNA, 10 bp, Artificial Sequence
  Synthetic Polynucleotide
cacgaagatg

SEQ ID NO: 4089 - DNA, 10 bp, Artificial Sequence
  Synthetic Polynucleotide
atttaaaatt

SEQ ID NO: 4090 - DNA, 10 bp, Artificial Sequence
  Synthetic Polynucleotide
tctaacgaat

SEQ ID NO: 4091 - DNA, 10 bp, Artificial Sequence
  Synthetic Polynucleotide
gataaatctt

SEQ ID NO: 4092 - DNA, 10 bp, Artificial Sequence
  Synthetic Polynucleotide
aattggtcat

SEQ ID NO: 4093 - DNA, 10 bp, Artificial Sequence
  Synthetic Polynucleotide
tagattttgt

SEQ ID NO: 4094 - DNA, 10 bp, Artificial Sequence
  Synthetic Polynucleotide
gtcatattca

SEQ ID NO: 4095 - DNA, 10 bp, Artificial Sequence
  Synthetic Polynucleotide
attgaaattg

SEQ ID NO: 4096 - DNA, 10 bp, Artificial Sequence
  Synthetic Polynucleotide
actgcatttg

SEQ ID NO: 4097 - DNA, 10 bp, Artificial Sequence
  Synthetic Polynucleotide
aaatgttgtc

SEQ ID NO: 4098 - DNA, 10 bp, Artificial Sequence
  Synthetic Polynucleotide
tccatcctgg

SEQ ID NO: 4099 - DNA, 10 bp, Artificial Sequence
  Synthetic Polynucleotide
tcttcattct

SEQ ID NO: 4100 - DNA, 10 bp, Artificial Sequence
  Synthetic Polynucleotide
aacttcatct

SEQ ID NO: 4101 - DNA, 10 bp, Artificial Sequence
  Synthetic Polynucleotide
gaaatctgaa

SEQ ID NO: 4102 - DNA, 10 bp, Artificial Sequence
  Synthetic Polynucleotide
ttgcattgag

SEQ ID NO: 4103 - DNA, 10 bp, Artificial Sequence
  Synthetic Polynucleotide
gtctatttct

SEQ ID NO: 4104 - DNA, 10 bp, Artificial Sequence
  Synthetic Polynucleotide
ctaccacatg

SEQ ID NO: 4105 - DNA, 10 bp, Artificial Sequence
  Synthetic Polynucleotide
taatgttgtt

SEQ ID NO: 4106 - DNA, 10 bp, Artificial Sequence
  Synthetic Polynucleotide
aatgttttcg

SEQ ID NO: 4107 - DNA, 10 bp, Artificial Sequence
  Synthetic Polynucleotide
attcagctta

SEQ ID NO: 4108 - DNA, 10 bp, Artificial Sequence
  Synthetic Polynucleotide
aagtcatcat

SEQ ID NO: 4109 - DNA, 10 bp, Artificial Sequence
  Synthetic Polynucleotide
ccagaacatt

SEQ ID NO: 4110 - DNA, 10 bp, Artificial Sequence
  Synthetic Polynucleotide
tggcaattca

SEQ ID NO: 4111 - DNA, 10 bp, Artificial Sequence
  Synthetic Polynucleotide
acagaatcaa

SEQ ID NO: 4112 - DNA, 10 bp, Artificial Sequence
  Synthetic Polynucleotide
atcatcatca

SEQ ID NO: 4113 - DNA, 10 bp, Artificial Sequence
  Synthetic Polynucleotide
tcaactggaa

SEQ ID NO: 4114 - DNA, 10 bp, Artificial Sequence
  Synthetic Polynucleotide
gcattaatcc

SEQ ID NO: 4115 - DNA, 10 bp, Artificial Sequence
  Synthetic Polynucleotide
ctgaaacact

SEQ ID NO: 4116 - DNA, 10 bp, Artificial Sequence
  Synthetic Polynucleotide
ctgacttaat

SEQ ID NO: 4117 - DNA, 10 bp, Artificial Sequence
  Synthetic Polynucleotide
gtatcttacg

SEQ ID NO: 4118 - DNA, 10 bp, Artificial Sequence
  Synthetic Polynucleotide
cttttaagtt

SEQ ID NO: 4119 - DNA, 10 bp, Artificial Sequence
  Synthetic Polynucleotide
gaagattatt

SEQ ID NO: 4120 - DNA, 10 bp, Artificial Sequence
  Synthetic Polynucleotide
aaaatttgat

SEQ ID NO: 4121 - DNA, 10 bp, Artificial Sequence
  Synthetic Polynucleotide
tcaagcgatg

SEQ ID NO: 4122 - DNA, 10 bp, Artificial Sequence
  Synthetic Polynucleotide
atcgtaaatg

SEQ ID NO: 4123 - DNA, 10 bp, Artificial Sequence
  Synthetic Polynucleotide
gactccatct

SEQ ID NO: 4124 - DNA, 10 bp, Artificial Sequence
  Synthetic Polynucleotide
ctccatttcg

SEQ ID NO: 4125 - DNA, 10 bp, Artificial Sequence
  Synthetic Polynucleotide
aatggtatcc

SEQ ID NO: 4126 - DNA, 10 bp, Artificial Sequence
  Synthetic Polynucleotide
aattcatcca

SEQ ID NO: 4127 - DNA, 10 bp, Artificial Sequence
  Synthetic Polynucleotide
atatcctgtt

SEQ ID NO: 4128 - DNA, 10 bp, Artificial Sequence
  Synthetic Polynucleotide
atattaacaa

SEQ ID NO: 4129 - DNA, 10 bp, Artificial Sequence
  Synthetic Polynucleotide
gtaagtgtat

SEQ ID NO: 4130 - DNA, 10 bp, Artificial Sequence
  Synthetic Polynucleotide
cttgaaagcg

SEQ ID NO: 4131 - DNA, 10 bp, Artificial Sequence
  Synthetic Polynucleotide
tttcttcatc

SEQ ID NO: 4132 - DNA, 10 bp, Artificial Sequence
  Synthetic Polynucleotide
ggagatgtaa

SEQ ID NO: 4133 - DNA, 10 bp, Artificial Sequence
  Synthetic Polynucleotide
tgagaacgtc

SEQ ID NO: 4134 - DNA, 10 bp, Artificial Sequence
  Synthetic Polynucleotide
aagatcagag

SEQ ID NO: 4135 - DNA, 10 bp, Artificial Sequence
  Synthetic Polynucleotide
cggcgaggtc

SEQ ID NO: 4136 - DNA, 10 bp, Artificial Sequence
  Synthetic Polynucleotide
gacattttgt

SEQ ID NO: 4137 - DNA, 10 bp, Artificial Sequence
  Synthetic Polynucleotide
atgtccttga

SEQ ID NO: 4138 - DNA, 10 bp, Artificial Sequence
  Synthetic Polynucleotide
taatcaagct

SEQ ID NO: 4139 - DNA, 10 bp, Artificial Sequence
  Synthetic Polynucleotide
ttagttagcg

SEQ ID NO: 4140 - DNA, 10 bp, Artificial Sequence
  Synthetic Polynucleotide
tcattgatta

SEQ ID NO: 4141 - DNA, 10 bp, Artificial Sequence
  Synthetic Polynucleotide
cctcatcatc

SEQ ID NO: 4142 - DNA, 10 bp, Artificial Sequence
  Synthetic Polynucleotide
gcattataat

SEQ ID NO: 4143 - DNA, 10 bp, Artificial Sequence
  Synthetic Polynucleotide
atgatcaggg

SEQ ID NO: 4144 - DNA, 10 bp, Artificial Sequence
  Synthetic Polynucleotide
ttcaatcccg

SEQ ID NO: 4145 - DNA, 10 bp, Artificial Sequence
  Synthetic Polynucleotide
cagacgtaga

SEQ ID NO: 4146 - DNA, 10 bp, Artificial Sequence
  Synthetic Polynucleotide
tggattagtc

SEQ ID NO: 4147 - DNA, 10 bp, Artificial Sequence
  Synthetic Polynucleotide
tcatattgtg

SEQ ID NO: 4148 - DNA, 10 bp, Artificial Sequence
  Synthetic Polynucleotide
atcaattcat

SEQ ID NO: 4149 - DNA, 10 bp, Artificial Sequence
  Synthetic Polynucleotide
ggtacagtat

SEQ ID NO: 4150 - DNA, 10 bp, Artificial Sequence
  Synthetic Polynucleotide
ctgtgactct

SEQ ID NO: 4151 - DNA, 10 bp, Artificial Sequence
  Synthetic Polynucleotide
tgcttcagct

SEQ ID NO: 4152 - DNA, 10 bp, Artificial Sequence
  Synthetic Polynucleotide
catcagatcg

SEQ ID NO: 4153 - DNA, 10 bp, Artificial Sequence
  Synthetic Polynucleotide
agatgtgcat

SEQ ID NO: 4154 - DNA, 10 bp, Artificial Sequence
  Synthetic Polynucleotide
ccatctgctg

SEQ ID NO: 4155 - DNA, 10 bp, Artificial Sequence
  Synthetic Polynucleotide
aacttcttca

SEQ ID NO: 4156 - DNA, 10 bp, Artificial Sequence
  Synthetic Polynucleotide
tcgattttga

SEQ ID NO: 4157 - DNA, 10 bp, Artificial Sequence
  Synthetic Polynucleotide
ccgatgaaca

SEQ ID NO: 4158 - DNA, 10 bp, Artificial Sequence
  Synthetic Polynucleotide
cttttctatt

SEQ ID NO: 4159 - DNA, 10 bp, Artificial Sequence
  Synthetic Polynucleotide
taacttaacc

SEQ ID NO: 4160 - DNA, 10 bp, Artificial Sequence
  Synthetic Polynucleotide
gattttagac

SEQ ID NO: 4161 - DNA, 10 bp, Artificial Sequence
  Synthetic Polynucleotide
cgttcaattg

SEQ ID NO: 4162 - DNA, 10 bp, Artificial Sequence
  Synthetic Polynucleotide
aaatttgcaa

SEQ ID NO: 4163 - DNA, 10 bp, Artificial Sequence
  Synthetic Polynucleotide
aatttcttga

SEQ ID NO: 4164 - DNA, 10 bp, Artificial Sequence
  Synthetic Polynucleotide
ctcagagagg

SEQ ID NO: 4165 - DNA, 10 bp, Artificial Sequence
  Synthetic Polynucleotide
tcatcatact

SEQ ID NO: 4166 - DNA, 10 bp, Artificial Sequence
  Synthetic Polynucleotide
tcgaacacat

SEQ ID NO: 4167 - DNA, 10 bp, Artificial Sequence
  Synthetic Polynucleotide
ggctagtttc

SEQ ID NO: 4168 - DNA, 10 bp, Artificial Sequence
  Synthetic Polynucleotide
tttattatat

SEQ ID NO: 4169 - DNA, 10 bp, Artificial Sequence
  Synthetic Polynucleotide
aacaaatcaa

SEQ ID NO: 4170 - DNA, 10 bp, Artificial Sequence
  Synthetic Polynucleotide
tcattagtta

SEQ ID NO: 4171 - DNA, 10 bp, Artificial Sequence
  Synthetic Polynucleotide
agaacgtgac

SEQ ID NO: 4172 - DNA, 10 bp, Artificial Sequence
  Synthetic Polynucleotide
gatatcagag

SEQ ID NO: 4173 - DNA, 10 bp, Artificial Sequence
  Synthetic Polynucleotide
ctgggtcagg

SEQ ID NO: 4174 - DNA, 10 bp, Artificial Sequence
  Synthetic Polynucleotide
taagctcaac

SEQ ID NO: 4175 - DNA, 10 bp, Artificial Sequence
  Synthetic Polynucleotide
tatcactcat

SEQ ID NO: 4176 - DNA, 10 bp, Artificial Sequence
  Synthetic Polynucleotide
attaataatt

SEQ ID NO: 4177 - DNA, 10 bp, Artificial Sequence
  Synthetic Polynucleotide
tgggtcatag

SEQ ID NO: 4178 - DNA, 10 bp, Artificial Sequence
  Synthetic Polynucleotide
ccggtcattc

SEQ ID NO: 4179 - DNA, 10 bp, Artificial Sequence
  Synthetic Polynucleotide
ttcaaccgtt

SEQ ID NO: 4180 - DNA, 10 bp, Artificial Sequence
  Synthetic Polynucleotide
acctcaagat

SEQ ID NO: 4181 - DNA, 10 bp, Artificial Sequence
  Synthetic Polynucleotide
ctgttcaaac

SEQ ID NO: 4182 - DNA, 10 bp, Artificial Sequence
  Synthetic Polynucleotide
actttgattt

SEQ ID NO: 4183 - DNA, 10 bp, Artificial Sequence
  Synthetic Polynucleotide
gtgcttcatt

SEQ ID NO: 4184 - DNA, 10 bp, Artificial Sequence
  Synthetic Polynucleotide
ataaacaatg

SEQ ID NO: 4185 - DNA, 10 bp, Artificial Sequence
  Synthetic Polynucleotide
gatgtaggag

SEQ ID NO: 4186 - DNA, 10 bp, Artificial Sequence
  Synthetic Polynucleotide
tggtgaatca

SEQ ID NO: 4187 - DNA, 10 bp, Artificial Sequence
  Synthetic Polynucleotide
gtagccgagt

SEQ ID NO: 4188 - DNA, 10 bp, Artificial Sequence
  Synthetic Polynucleotide
atagactcga

SEQ ID NO: 4189 - DNA, 10 bp, Artificial Sequence
  Synthetic Polynucleotide
gaaaagcatc

SEQ ID NO: 4190 - DNA, 10 bp, Artificial Sequence
  Synthetic Polynucleotide
agctcgacaa

SEQ ID NO: 4191 - DNA, 10 bp, Artificial Sequence
  Synthetic Polynucleotide
aatggtgagt

SEQ ID NO: 4192 - DNA, 10 bp, Artificial Sequence
  Synthetic Polynucleotide
catatcaggc

SEQ ID NO: 4193 - DNA, 10 bp, Artificial Sequence
  Synthetic Polynucleotide
tataaggtcg

SEQ ID NO: 4194 - DNA, 10 bp, Artificial Sequence
  Synthetic Polynucleotide
tctaccgaaa

SEQ ID NO: 4195 - DNA, 10 bp, Artificial Sequence
  Synthetic Polynucleotide
taatctatct

SEQ ID NO: 4196 - DNA, 10 bp, Artificial Sequence
  Synthetic Polynucleotide
agataaaagt

SEQ ID NO: 4197 - DNA, 10 bp, Artificial Sequence
  Synthetic Polynucleotide
tccaacctgt

SEQ ID NO: 4198 - DNA, 10 bp, Artificial Sequence
  Synthetic Polynucleotide
gctcttgaag

SEQ ID NO: 4199 - DNA, 10 bp, Artificial Sequence
  Synthetic Polynucleotide
cccacatagc

SEQ ID NO: 4200 - DNA, 10 bp, Artificial Sequence
  Synthetic Polynucleotide
cgtcagtagc

SEQ ID NO: 4201 - DNA, 10 bp, Artificial Sequence
  Synthetic Polynucleotide
cctcatctaa

SEQ ID NO: 4202 - DNA, 10 bp, Artificial Sequence
  Synthetic Polynucleotide
agaactaccc

SEQ ID NO: 4203 - DNA, 10 bp, Artificial Sequence
  Synthetic Polynucleotide
cgacttgggt

SEQ ID NO: 4204 - DNA, 10 bp, Artificial Sequence
  Synthetic Polynucleotide
cgactttacc

SEQ ID NO: 4205 - DNA, 10 bp, Artificial Sequence
  Synthetic Polynucleotide
tagacacatt

SEQ ID NO: 4206 - DNA, 10 bp, Artificial Sequence
  Synthetic Polynucleotide
ctcttacgtt

SEQ ID NO: 4207 - DNA, 10 bp, Artificial Sequence
  Synthetic Polynucleotide
ttgaaaggtt

SEQ ID NO: 4208 - DNA, 10 bp, Artificial Sequence
  Synthetic Polynucleotide
gctctccaac

SEQ ID NO: 4209 - DNA, 10 bp, Artificial Sequence
  Synthetic Polynucleotide
cgattagtga

SEQ ID NO: 4210 - DNA, 10 bp, Artificial Sequence
  Synthetic Polynucleotide
aagaacaaga

SEQ ID NO: 4211 - DNA, 10 bp, Artificial Sequence
  Synthetic Polynucleotide
tttctctata

SEQ ID NO: 4212 - DNA, 10 bp, Artificial Sequence
  Synthetic Polynucleotide
aattaaacat

SEQ ID NO: 4213 - DNA, 10 bp, Artificial Sequence
  Synthetic Polynucleotide
tctaagaatg

SEQ ID NO: 4214 - DNA, 10 bp, Artificial Sequence
  Synthetic Polynucleotide
gatcaactcc

SEQ ID NO: 4215 - DNA, 10 bp, Artificial Sequence
  Synthetic Polynucleotide
gatcatacga

SEQ ID NO: 4216 - DNA, 10 bp, Artificial Sequence
  Synthetic Polynucleotide
atgatcaggt

SEQ ID NO: 4217 - DNA, 10 bp, Artificial Sequence
  Synthetic Polynucleotide
acctcaaacg

SEQ ID NO: 4218 - DNA, 10 bp, Artificial Sequence
  Synthetic Polynucleotide
cgtttcgacg

SEQ ID NO: 4219 - DNA, 10 bp, Artificial Sequence
  Synthetic Polynucleotide
tcattctcaa

SEQ ID NO: 4220 - DNA, 10 bp, Artificial Sequence
  Synthetic Polynucleotide
accccttcta

SEQ ID NO: 4221 - DNA, 10 bp, Artificial Sequence
  Synthetic Polynucleotide
agttatgaag

SEQ ID NO: 4222 - DNA, 10 bp, Artificial Sequence
  Synthetic Polynucleotide
tcattagcca

SEQ ID NO: 4223 - DNA, 10 bp, Artificial Sequence
  Synthetic Polynucleotide
atgtgctacg

SEQ ID NO: 4224 - DNA, 10 bp, Artificial Sequence
  Synthetic Polynucleotide
ctcatttctt

SEQ ID NO: 4225 - DNA, 10 bp, Artificial Sequence
  Synthetic Polynucleotide
gagtgctcga

SEQ ID NO: 4226 - DNA, 10 bp, Artificial Sequence
  Synthetic Polynucleotide
gttttagaag

SEQ ID NO: 4227 - DNA, 10 bp, Artificial Sequence
  Synthetic Polynucleotide
tgttttccat

SEQ ID NO: 4228 - DNA, 10 bp, Artificial Sequence
  Synthetic Polynucleotide
ggggattggg

SEQ ID NO: 4229 - DNA, 10 bp, Artificial Sequence
  Synthetic Polynucleotide
ggaaagtccc

SEQ ID NO: 4230 - DNA, 10 bp, Artificial Sequence
  Synthetic Polynucleotide
taaaagaaaa

SEQ ID NO: 4231 - DNA, 10 bp, Artificial Sequence
  Synthetic Polynucleotide
agaagcgaga

SEQ ID NO: 4232 - DNA, 10 bp, Artificial Sequence
  Synthetic Polynucleotide
gaatgaaaga

SEQ ID NO: 4233 - DNA, 10 bp, Artificial Sequence
  Synthetic Polynucleotide
ttacccatgg

SEQ ID NO: 4234 - DNA, 10 bp, Artificial Sequence
  Synthetic Polynucleotide
ggatcccgtg

SEQ ID NO: 4235 - DNA, 10 bp, Artificial Sequence
  Synthetic Polynucleotide
tattccctaa

SEQ ID NO: 4236 - DNA, 10 bp, Artificial Sequence
  Synthetic Polynucleotide
cacattggtg

SEQ ID NO: 4237 - DNA, 10 bp, Artificial Sequence
  Synthetic Polynucleotide
aaatatgcat

SEQ ID NO: 4238 - DNA, 10 bp, Artificial Sequence
  Synthetic Polynucleotide
acaggagcag

SEQ ID NO: 4239 - DNA, 10 bp, Artificial Sequence
  Synthetic Polynucleotide
ccaaagagag

SEQ ID NO: 4240 - DNA, 10 bp, Artificial Sequence
  Synthetic Polynucleotide
aattggatga

SEQ ID NO: 4241 - DNA, 10 bp, Artificial Sequence
  Synthetic Polynucleotide
gttaatactg

SEQ ID NO: 4242 - DNA, 10 bp, Artificial Sequence
  Synthetic Polynucleotide
ggccagcccc

SEQ ID NO: 4243 - DNA, 10 bp, Artificial Sequence
  Synthetic Polynucleotide
accctctcct

SEQ ID NO: 4244 - DNA, 10 bp, Artificial Sequence
  Synthetic Polynucleotide
gaaaggaaaa

SEQ ID NO: 4245 - DNA, 10 bp, Artificial Sequence
  Synthetic Polynucleotide
aaaagggtgg

SEQ ID NO: 4246 - DNA, 10 bp, Artificial Sequence
  Synthetic Polynucleotide
ccctggaaca

SEQ ID NO: 4247 - DNA, 10 bp, Artificial Sequence
  Synthetic Polynucleotide
tgtaatttat

SEQ ID NO: 4248 - DNA, 10 bp, Artificial Sequence
  Synthetic Polynucleotide
atatggatga

SEQ ID NO: 4249 - DNA, 10 bp, Artificial Sequence
  Synthetic Polynucleotide
tctggggttt

SEQ ID NO: 4250 - DNA, 10 bp, Artificial Sequence
  Synthetic Polynucleotide
tccttataat

SEQ ID NO: 4251 - DNA, 10 bp, Artificial Sequence
  Synthetic Polynucleotide
gtaaaacatg

SEQ ID NO: 4252 - DNA, 10 bp, Artificial Sequence
  Synthetic Polynucleotide
ttagaagaaa

SEQ ID NO: 4253 - DNA, 10 bp, Artificial Sequence
  Synthetic Polynucleotide
cagcatttgt

SEQ ID NO: 4254 - DNA, 10 bp, Artificial Sequence
  Synthetic Polynucleotide
gttttgcagg

SEQ ID NO: 4255 - DNA, 10 bp, Artificial Sequence
  Synthetic Polynucleotide
acaatcatcc

SEQ ID NO: 4256 - DNA, 10 bp, Artificial Sequence
  Synthetic Polynucleotide
taattggaaa

SEQ ID NO: 4257 - DNA, 10 bp, Artificial Sequence
  Synthetic Polynucleotide
tctactattc

SEQ ID NO: 4258 - DNA, 10 bp, Artificial Sequence
  Synthetic Polynucleotide
ataggaggaa

SEQ ID NO: 4259 - DNA, 10 bp, Artificial Sequence
  Synthetic Polynucleotide
ttagctgtag

SEQ ID NO: 4260 - DNA, 10 bp, Artificial Sequence
  Synthetic Polynucleotide
taattgcacc

SEQ ID NO: 4261 - DNA, 10 bp, Artificial Sequence
  Synthetic Polynucleotide
tgtactgtgt

SEQ ID NO: 4262 - DNA, 10 bp, Artificial Sequence
  Synthetic Polynucleotide
ttaaaacaaa

SEQ ID NO: 4263 - DNA, 10 bp, Artificial Sequence
  Synthetic Polynucleotide
acagttttgt

SEQ ID NO: 4264 - DNA, 10 bp, Artificial Sequence
  Synthetic Polynucleotide
cagctgccca

SEQ ID NO: 4265 - DNA, 10 bp, Artificial Sequence
  Synthetic Polynucleotide
ctttgcagta

SEQ ID NO: 4266 - DNA, 10 bp, Artificial Sequence
  Synthetic Polynucleotide
aaagggtgat

SEQ ID NO: 4267 - DNA, 10 bp, Artificial Sequence
  Synthetic Polynucleotide
ctcgtctaaa

SEQ ID NO: 4268 - DNA, 10 bp, Artificial Sequence
  Synthetic Polynucleotide
cacttagaat

SEQ ID NO: 4269 - DNA, 10 bp, Artificial Sequence
  Synthetic Polynucleotide
atcttttata

SEQ ID NO: 4270 - DNA, 10 bp, Artificial Sequence
  Synthetic Polynucleotide
catgctaaac

SEQ ID NO: 4271 - DNA, 10 bp, Artificial Sequence
  Synthetic Polynucleotide
gtgttagttt

SEQ ID NO: 4272 - DNA, 10 bp, Artificial Sequence
  Synthetic Polynucleotide
tggcagatga

SEQ ID NO: 4273 - DNA, 10 bp, Artificial Sequence
  Synthetic Polynucleotide
aggaactcat

SEQ ID NO: 4274 - DNA, 10 bp, Artificial Sequence
  Synthetic Polynucleotide
aaagttgtac

SEQ ID NO: 4275 - DNA, 10 bp, Artificial Sequence
  Synthetic Polynucleotide
gcctggacgg

SEQ ID NO: 4276 - DNA, 10 bp, Artificial Sequence
  Synthetic Polynucleotide
ttgggaagag

SEQ ID NO: 4277 - DNA, 10 bp, Artificial Sequence
  Synthetic Polynucleotide
aggaaagaag

SEQ ID NO: 4278 - DNA, 10 bp, Artificial Sequence
  Synthetic Polynucleotide
tggaaagaga

SEQ ID NO: 4279 - DNA, 10 bp, Artificial Sequence
  Synthetic Polynucleotide
tctttgttga

SEQ ID NO: 4280 - DNA, 10 bp, Artificial Sequence
  Synthetic Polynucleotide
atcaaagata

SEQ ID NO: 4281 - DNA, 10 bp, Artificial Sequence
  Synthetic Polynucleotide
tgttgtacat

SEQ ID NO: 4282 - DNA, 10 bp, Artificial Sequence
  Synthetic Polynucleotide
acaatcaagt

SEQ ID NO: 4283 - DNA, 10 bp, Artificial Sequence
  Synthetic Polynucleotide
tgaacttgag

SEQ ID NO: 4284 - DNA, 10 bp, Artificial Sequence
  Synthetic Polynucleotide
gaggattaag

SEQ ID NO: 4285 - DNA, 10 bp, Artificial Sequence
  Synthetic Polynucleotide
tgtagtattg

SEQ ID NO: 4286 - DNA, 10 bp, Artificial Sequence
  Synthetic Polynucleotide
atatgatgca

SEQ ID NO: 4287 - DNA, 10 bp, Artificial Sequence
  Synthetic Polynucleotide
tgatgcaatg

SEQ ID NO: 4288 - DNA, 10 bp, Artificial Sequence
  Synthetic Polynucleotide
taaaacttct

SEQ ID NO: 4289 - DNA, 10 bp, Artificial Sequence
  Synthetic Polynucleotide
cataatattt

SEQ ID NO: 4290 - DNA, 10 bp, Artificial Sequence
  Synthetic Polynucleotide
taaaattagc

SEQ ID NO: 4291 - DNA, 10 bp, Artificial Sequence
  Synthetic Polynucleotide
tgctcatcac

SEQ ID NO: 4292 - DNA, 10 bp, Artificial Sequence
  Synthetic Polynucleotide
aaaccagcaa

SEQ ID NO: 4293 - DNA, 10 bp, Artificial Sequence
  Synthetic Polynucleotide
cttcatcttg

SEQ ID NO: 4294 - DNA, 10 bp, Artificial Sequence
  Synthetic Polynucleotide
cagcatcaag

SEQ ID NO: 4295 - DNA, 10 bp, Artificial Sequence
  Synthetic Polynucleotide
atatagaaat

SEQ ID NO: 4296 - DNA, 10 bp, Artificial Sequence
  Synthetic Polynucleotide
cgaggaaagg

SEQ ID NO: 4297 - DNA, 10 bp, Artificial Sequence
  Synthetic Polynucleotide
gcttcatcaa

SEQ ID NO: 4298 - DNA, 10 bp, Artificial Sequence
  Synthetic Polynucleotide
tataagaaag

SEQ ID NO: 4299 - DNA, 10 bp, Artificial Sequence
  Synthetic Polynucleotide
ttccgctttt

SEQ ID NO: 4300 - DNA, 10 bp, Artificial Sequence
  Synthetic Polynucleotide
gaaacagaaa

SEQ ID NO: 4301 - DNA, 10 bp, Artificial Sequence
  Synthetic Polynucleotide
cttcttcatc

SEQ ID NO: 4302 - DNA, 10 bp, Artificial Sequence
  Synthetic Polynucleotide
aaaagatatg

SEQ ID NO: 4303 - DNA, 10 bp, Artificial Sequence
  Synthetic Polynucleotide
cgccgccgcc

SEQ ID NO: 4304 - DNA, 10 bp, Artificial Sequence
  Synthetic Polynucleotide
cagatcgagg

SEQ ID NO: 4305 - DNA, 10 bp, Artificial Sequence
  Synthetic Polynucleotide
ttttaatttc

SEQ ID NO: 4306 - DNA, 10 bp, Artificial Sequence
  Synthetic Polynucleotide
attgaaatta

SEQ ID NO: 4307 - DNA, 10 bp, Artificial Sequence
  Synthetic Polynucleotide
gaacgggtcg

SEQ ID NO: 4308 - DNA, 10 bp, Artificial Sequence
  Synthetic Polynucleotide
ggatctcgga

SEQ ID NO: 4309 - DNA, 10 bp, Artificial Sequence
  Synthetic Polynucleotide
aagaagctga

SEQ ID NO: 4310 - DNA, 10 bp, Artificial Sequence
  Synthetic Polynucleotide
aaaatcatca

SEQ ID NO: 4311 - DNA, 10 bp, Artificial Sequence
  Synthetic Polynucleotide
agaaattgaa

SEQ ID NO: 4312 - DNA, 10 bp, Artificial Sequence
  Synthetic Polynucleotide
cttcgccgcg

SEQ ID NO: 4313 - DNA, 10 bp, Artificial Sequence
  Synthetic Polynucleotide
cgacgaagtg

SEQ ID NO: 4314 - DNA, 10 bp, Artificial Sequence
  Synthetic Polynucleotide
taacttttaa

SEQ ID NO: 4315 - DNA, 10 bp, Artificial Sequence
  Synthetic Polynucleotide
aaaataaaga

SEQ ID NO: 4316 - DNA, 10 bp, Artificial Sequence
  Synthetic Polynucleotide
atcatcatca

SEQ ID NO: 4317 - DNA, 10 bp, Artificial Sequence
  Synthetic Polynucleotide
aaaagaaaac

SEQ ID NO: 4318 - DNA, 10 bp, Artificial Sequence
  Synthetic Polynucleotide
tgtcgccgtc

SEQ ID NO: 4319 - DNA, 10 bp, Artificial Sequence
  Synthetic Polynucleotide
ggcatcaccg

SEQ ID NO: 4320 - DNA, 10 bp, Artificial Sequence
  Synthetic Polynucleotide
tgctgctcga

SEQ ID NO: 4321 - DNA, 10 bp, Artificial Sequence
  Synthetic Polynucleotide
cgaaaatttc

SEQ ID NO: 4322 - DNA, 10 bp, Artificial Sequence
  Synthetic Polynucleotide
attgtcttat

SEQ ID NO: 4323 - DNA, 10 bp, Artificial Sequence
  Synthetic Polynucleotide
gcagaacaag

SEQ ID NO: 4324 - DNA, 10 bp, Artificial Sequence
  Synthetic Polynucleotide
tcaaaatcaa

SEQ ID NO: 4325 - DNA, 10 bp, Artificial Sequence
  Synthetic Polynucleotide
aaatatgatt

SEQ ID NO: 4326 - DNA, 10 bp, Artificial Sequence
  Synthetic Polynucleotide
ccgctccagc

SEQ ID NO: 4327 - DNA, 10 bp, Artificial Sequence
  Synthetic Polynucleotide
acgccaacag

SEQ ID NO: 4328 - DNA, 10 bp, Artificial Sequence
  Synthetic Polynucleotide
taagtctttt

SEQ ID NO: 4329 - DNA, 10 bp, Artificial Sequence
  Synthetic Polynucleotide
aaaatacaaa

SEQ ID NO: 4330 - DNA, 10 bp, Artificial Sequence
  Synthetic Polynucleotide
cagccactcg

SEQ ID NO: 4331 - DNA, 10 bp, Artificial Sequence
  Synthetic Polynucleotide
gccgccaagg

SEQ ID NO: 4332 - DNA, 10 bp, Artificial Sequence
  Synthetic Polynucleotide
tcatcccctt

SEQ ID NO: 4333 - DNA, 10 bp, Artificial Sequence
  Synthetic Polynucleotide
attatttcat

SEQ ID NO: 4334 - DNA, 10 bp, Artificial Sequence
  Synthetic Polynucleotide
tatttgtcag

SEQ ID NO: 4335 - DNA, 10 bp, Artificial Sequence
  Synthetic Polynucleotide
gaaagcaata

SEQ ID NO: 4336 - DNA, 10 bp, Artificial Sequence
  Synthetic Polynucleotide
gcgtatcagc

SEQ ID NO: 4337 - DNA, 10 bp, Artificial Sequence
  Synthetic Polynucleotide
caacaacgtt

SEQ ID NO: 4338 - DNA, 10 bp, Artificial Sequence
  Synthetic Polynucleotide
tcctgagcct

SEQ ID NO: 4339 - DNA, 10 bp, Artificial Sequence
  Synthetic Polynucleotide
ttcagggtcg

SEQ ID NO: 4340 - DNA, 10 bp, Artificial Sequence
  Synthetic Polynucleotide
agctagaaaa

SEQ ID NO: 4341 - DNA, 10 bp, Artificial Sequence
  Synthetic Polynucleotide
cttacaatac

SEQ ID NO: 4342 - DNA, 10 bp, Artificial Sequence
  Synthetic Polynucleotide
catttaaacc

SEQ ID NO: 4343 - DNA, 10 bp, Artificial Sequence
  Synthetic Polynucleotide
acctgcaaag

SEQ ID NO: 4344 - DNA, 10 bp, Artificial Sequence
  Synthetic Polynucleotide
ggcttcgggg

SEQ ID NO: 4345 - DNA, 10 bp, Artificial Sequence
  Synthetic Polynucleotide
acgcaggagg

SEQ ID NO: 4346 - DNA, 10 bp, Artificial Sequence
  Synthetic Polynucleotide
gcatgttggc

SEQ ID NO: 4347 - DNA, 10 bp, Artificial Sequence
  Synthetic Polynucleotide
gataagagag

SEQ ID NO: 4348 - DNA, 10 bp, Artificial Sequence
  Synthetic Polynucleotide
acttcttctg

SEQ ID NO: 4349 - DNA, 10 bp, Artificial Sequence
  Synthetic Polynucleotide
gtagacaccc

SEQ ID NO: 4350 - DNA, 10 bp, Artificial Sequence
  Synthetic Polynucleotide
tgcatacgtg

SEQ ID NO: 4351 - DNA, 10 bp, Artificial Sequence
  Synthetic Polynucleotide
acaggttcgg

SEQ ID NO: 4352 - DNA, 10 bp, Artificial Sequence
  Synthetic Polynucleotide
tccatgttca

SEQ ID NO: 4353 - DNA, 10 bp, Artificial Sequence
  Synthetic Polynucleotide
atgatgaaat

SEQ ID NO: 4354 - DNA, 10 bp, Artificial Sequence
  Synthetic Polynucleotide
tggaggcaca

SEQ ID NO: 4355 - DNA, 10 bp, Artificial Sequence
  Synthetic Polynucleotide
ggaagtgcgc

SEQ ID NO: 4356 - DNA, 10 bp, Artificial Sequence
  Synthetic Polynucleotide
tcggcccagt

SEQ ID NO: 4357 - DNA, 10 bp, Artificial Sequence
  Synthetic Polynucleotide
atgaccatgc

SEQ ID NO: 4358 - DNA, 10 bp, Artificial Sequence
  Synthetic Polynucleotide
tatttaggac

SEQ ID NO: 4359 - DNA, 10 bp, Artificial Sequence
  Synthetic Polynucleotide
atgatgaagt

SEQ ID NO: 4360 - DNA, 10 bp, Artificial Sequence
  Synthetic Polynucleotide
ccaccatatc

SEQ ID NO: 4361 - DNA, 10 bp, Artificial Sequence
  Synthetic Polynucleotide
gaagcgggag

SEQ ID NO: 4362 - DNA, 10 bp, Artificial Sequence
  Synthetic Polynucleotide
cattgtacct

SEQ ID NO: 4363 - DNA, 10 bp, Artificial Sequence
  Synthetic Polynucleotide
aatagggagg

SEQ ID NO: 4364 - DNA, 10 bp, Artificial Sequence
  Synthetic Polynucleotide
aacaaacgtt

SEQ ID NO: 4365 - DNA, 10 bp, Artificial Sequence
  Synthetic Polynucleotide
taggggtgcc

SEQ ID NO: 4366 - DNA, 10 bp, Artificial Sequence
  Synthetic Polynucleotide
ccccattgtt

SEQ ID NO: 4367 - DNA, 10 bp, Artificial Sequence
  Synthetic Polynucleotide
acatgaacac

SEQ ID NO: 4368 - DNA, 10 bp, Artificial Sequence
  Synthetic Polynucleotide
aggggtatga

SEQ ID NO: 4369 - DNA, 10 bp, Artificial Sequence
  Synthetic Polynucleotide
gcatcttcca

SEQ ID NO: 4370 - DNA, 10 bp, Artificial Sequence
  Synthetic Polynucleotide
gaatgaatcc

SEQ ID NO: 4371 - DNA, 10 bp, Artificial Sequence
  Synthetic Polynucleotide
acccagctcc

SEQ ID NO: 4372 - DNA, 10 bp, Artificial Sequence
  Synthetic Polynucleotide
gcggggcgat

SEQ ID NO: 4373 - DNA, 10 bp, Artificial Sequence
  Synthetic Polynucleotide
acagtgttgc

SEQ ID NO: 4374 - DNA, 10 bp, Artificial Sequence
  Synthetic Polynucleotide
gttttctact

SEQ ID NO: 4375 - DNA, 10 bp, Artificial Sequence
  Synthetic Polynucleotide
agttgcaaga

SEQ ID NO: 4376 - DNA, 10 bp, Artificial Sequence
  Synthetic Polynucleotide
caccattgtt

SEQ ID NO: 4377 - DNA, 10 bp, Artificial Sequence
  Synthetic Polynucleotide
ggtataatgt

SEQ ID NO: 4378 - DNA, 10 bp, Artificial Sequence
  Synthetic Polynucleotide
tcatgtcacc

SEQ ID NO: 4379 - DNA, 10 bp, Artificial Sequence
  Synthetic Polynucleotide
aaatggcaaa

SEQ ID NO: 4380 - DNA, 10 bp, Artificial Sequence
  Synthetic Polynucleotide
tgtgggttgg

SEQ ID NO: 4381 - DNA, 10 bp, Artificial Sequence
  Synthetic Polynucleotide
ggtccaagcc

SEQ ID NO: 4382 - DNA, 10 bp, Artificial Sequence
  Synthetic Polynucleotide
gctcgacaag

SEQ ID NO: 4383 - DNA, 10 bp, Artificial Sequence
  Synthetic Polynucleotide
gtctatcaga

SEQ ID NO: 4384 - DNA, 10 bp, Artificial Sequence
  Synthetic Polynucleotide
tggttcagaa

SEQ ID NO: 4385 - DNA, 10 bp, Artificial Sequence
  Synthetic Polynucleotide
attgtccaaa

SEQ ID NO: 4386 - DNA, 10 bp, Artificial Sequence
  Synthetic Polynucleotide
tcgtcaagaa

SEQ ID NO: 4387 - DNA, 10 bp, Artificial Sequence
  Synthetic Polynucleotide
ttcgagcttt

SEQ ID NO: 4388 - DNA, 10 bp, Artificial Sequence
  Synthetic Polynucleotide
tggaggcggg

SEQ ID NO: 4389 - DNA, 10 bp, Artificial Sequence
  Synthetic Polynucleotide
ttcaccgacg

SEQ ID NO: 4390 - DNA, 10 bp, Artificial Sequence
  Synthetic Polynucleotide
cgtctgtgtt

SEQ ID NO: 4391 - DNA, 10 bp, Artificial Sequence
  Synthetic Polynucleotide
ccctctggcc

SEQ ID NO: 4392 - DNA, 10 bp, Artificial Sequence
  Synthetic Polynucleotide
tcatgcaata

SEQ ID NO: 4393 - DNA, 10 bp, Artificial Sequence
  Synthetic Polynucleotide
tacatcctac

SEQ ID NO: 4394 - DNA, 10 bp, Artificial Sequence
  Synthetic Polynucleotide
aactcaccag

SEQ ID NO: 4395 - DNA, 10 bp, Artificial Sequence
  Synthetic Polynucleotide
acgattgctg

SEQ ID NO: 4396 - DNA, 10 bp, Artificial Sequence
  Synthetic Polynucleotide
gccatcctga

SEQ ID NO: 4397 - DNA, 10 bp, Artificial Sequence
  Synthetic Polynucleotide
ctgatgaaca

SEQ ID NO: 4398 - DNA, 10 bp, Artificial Sequence
  Synthetic Polynucleotide
taatgaatga

SEQ ID NO: 4399 - DNA, 10 bp, Artificial Sequence
  Synthetic Polynucleotide
cggttcagaa

SEQ ID NO: 4400 - DNA, 10 bp, Artificial Sequence
  Synthetic Polynucleotide
acgactatct

SEQ ID NO: 4401 - DNA, 10 bp, Artificial Sequence
  Synthetic Polynucleotide
acccagtgtt

SEQ ID NO: 4402 - DNA, 10 bp, Artificial Sequence
  Synthetic Polynucleotide
atctggtttt

SEQ ID NO: 4403 - DNA, 10 bp, Artificial Sequence
  Synthetic Polynucleotide
tgatgatgtt

SEQ ID NO: 4404 - DNA, 10 bp, Artificial Sequence
  Synthetic Polynucleotide
agctgcatcg

SEQ ID NO: 4405 - DNA, 10 bp, Artificial Sequence
  Synthetic Polynucleotide
agcagctatc

SEQ ID NO: 4406 - DNA, 10 bp, Artificial Sequence
  Synthetic Polynucleotide
tcgtaatcca

SEQ ID NO: 4407 - DNA, 10 bp, Artificial Sequence
  Synthetic Polynucleotide
atcttcgctt

SEQ ID NO: 4408 - DNA, 10 bp, Artificial Sequence
  Synthetic Polynucleotide
tcgtaattac

SEQ ID NO: 4409 - DNA, 10 bp, Artificial Sequence
  Synthetic Polynucleotide
tcattaccac

SEQ ID NO: 4410 - DNA, 10 bp, Artificial Sequence
  Synthetic Polynucleotide
aagcaattca

SEQ ID NO: 4411 - DNA, 10 bp, Artificial Sequence
  Synthetic Polynucleotide
acttcttctg

SEQ ID NO: 4412 - DNA, 10 bp, Artificial Sequence
  Synthetic Polynucleotide
gcgaaaaggg

SEQ ID NO: 4413 - DNA, 10 bp, Artificial Sequence
  Synthetic Polynucleotide
gacgacaaca

SEQ ID NO: 4414 - DNA, 10 bp, Artificial Sequence
  Synthetic Polynucleotide
tttatgttgg

SEQ ID NO: 4415 - DNA, 10 bp, Artificial Sequence
  Synthetic Polynucleotide
ctccctccaa

SEQ ID NO: 4416 - DNA, 10 bp, Artificial Sequence
  Synthetic Polynucleotide
gttgttgggc

SEQ ID NO: 4417 - DNA, 10 bp, Artificial Sequence
  Synthetic Polynucleotide
ctatctgaag

SEQ ID NO: 4418 - DNA, 19 bp, Artificial Sequence
  Synthetic Polynucleotide
atatcaaatcctcctcgtt

SEQ ID NO: 4419 - DNA, 18 bp, Artificial Sequence
  Synthetic Polynucleotide
tttgatgcgtttcttacc

SEQ ID NO: 4420 - DNA, 17 bp, Artificial Sequence
  Synthetic Polynucleotide
ccactcgtaggtgtagg

SEQ ID NO: 4421 - DNA, 17 bp, Artificial Sequence
  Synthetic Polynucleotide
tcgatgatgccgcagtg

SEQ ID NO: 4422 - DNA, 17 bp, Artificial Sequence
  Synthetic Polynucleotide
tccttgtctatgggcac

SEQ ID NO: 4423 - DNA, 17 bp, Artificial Sequence
  Synthetic Polynucleotide
gccatgacggaccagtt

SEQ ID NO: 4424 - DNA, 17 bp, Artificial Sequence
  Synthetic Polynucleotide
cgcaatggggagctaat

SEQ ID NO: 4425 - DNA, 19 bp, Artificial Sequence
  Synthetic Polynucleotide
cccctttgttgcagatcac

SEQ ID NO: 4426 - DNA, 20 bp, Artificial Sequence
  Synthetic Polynucleotide
atttgaaatggaagaaccta

SEQ ID NO: 4427 - DNA, 20 bp, Artificial Sequence
  Synthetic Polynucleotide
atgtttgaaaatttagcacc

SEQ ID NO: 4428 - DNA, 18 bp, Artificial Sequence
  Synthetic Polynucleotide
atctccttggaactcatg

SEQ ID NO: 4429 - DNA, 20 bp, Artificial Sequence
  Synthetic Polynucleotide
gattgcttacctgactatga

SEQ ID NO: 4430 - DNA, 17 bp, Artificial Sequence
  Synthetic Polynucleotide
aattgggtcaagagcga

SEQ ID NO: 4431 - DNA, 17 bp, Artificial Sequence
  Synthetic Polynucleotide
acatgttcggtttgacc

SEQ ID NO: 4432 - DNA, 18 bp, Artificial Sequence
  Synthetic Polynucleotide
taggtgaaatagggatcg

SEQ ID NO: 4433 - DNA, 19 bp, Artificial Sequence
  Synthetic Polynucleotide
aacgtgaatccctttaacc

SEQ ID NO: 4434 - DNA, 19 bp, Artificial Sequence
  Synthetic Polynucleotide
tgcattgggaattgtagta

SEQ ID NO: 4435 - DNA, 17 bp, Artificial Sequence
  Synthetic Polynucleotide
cgtagatgggaccaaac

SEQ ID NO: 4436 - DNA, 18 bp, Artificial Sequence
  Synthetic Polynucleotide
tcacatcaacagccattc

SEQ ID NO: 4437 - DNA, 20 bp, Artificial Sequence
  Synthetic Polynucleotide
ctggggtgacacagtagaag

SEQ ID NO: 4438 - DNA, 18 bp, Artificial Sequence
  Synthetic Polynucleotide
aaccaatccagtaacacg

SEQ ID NO: 4439 - DNA, 19 bp, Artificial Sequence
  Synthetic Polynucleotide
gcgtattggaaacagtgac

SEQ ID NO: 4440 - DNA, 20 bp, Artificial Sequence
  Synthetic Polynucleotide
gtgaactttctttgctgctg

SEQ ID NO: 4441 - DNA, 20 bp, Artificial Sequence
  Synthetic Polynucleotide
attaaaccctttagcagttg

SEQ ID NO: 4442 - DNA, 18 bp, Artificial Sequence
  Synthetic Polynucleotide
ccctttgtaaagcctgag

SEQ ID NO: 4443 - DNA, 20 bp, Artificial Sequence
  Synthetic Polynucleotide
gtctgagagttttgtaccag

SEQ ID NO: 4444 - DNA, 18 bp, Artificial Sequence
  Synthetic Polynucleotide
acgggaagtttcagtgat

SEQ ID NO: 4445 - DNA, 20 bp, Artificial Sequence
  Synthetic Polynucleotide
ttaagtggaccttatccaac

SEQ ID NO: 4446 - DNA, 20 bp, Artificial Sequence
  Synthetic Polynucleotide
cgtatcaatcacattaggta

SEQ ID NO: 4447 - DNA, 17 bp, Artificial Sequence
  Synthetic Polynucleotide
gctgatcttggaagtgc

SEQ ID NO: 4448 - DNA, 17 bp, Artificial Sequence
  Synthetic Polynucleotide
gatgcaatgccaggagt

SEQ ID NO: 4449 - DNA, 17 bp, Artificial Sequence
  Synthetic Polynucleotide
actggggaggcactgct

SEQ ID NO: 4450 - DNA, 17 bp, Artificial Sequence
  Synthetic Polynucleotide
tttgtcatgggtgaaga

SEQ ID NO: 4451 - DNA, 20 bp, Artificial Sequence
  Synthetic Polynucleotide
gttttcattcatcatgtcta

SEQ ID NO: 4452 - DNA, 19 bp, Artificial Sequence
  Synthetic Polynucleotide
acttatagacgggagaaca

SEQ ID NO: 4453 - DNA, 17 bp, Artificial Sequence
  Synthetic Polynucleotide
tggtccacactgatccc

SEQ ID NO: 4454 - DNA, 17 bp, Artificial Sequence
  Synthetic Polynucleotide
tcaggtgaaggatggcc

SEQ ID NO: 4455 - DNA, 18 bp, Artificial Sequence
  Synthetic Polynucleotide
gtggagagtcagggaggc

SEQ ID NO: 4456 - DNA, 17 bp, Artificial Sequence
  Synthetic Polynucleotide
tcatgtttgatgcaaca

SEQ ID NO: 4457 - DNA, 20 bp, Artificial Sequence
  Synthetic Polynucleotide
cgtacctcaatgaaacgcat

SEQ ID NO: 4458 - DNA, 18 bp, Artificial Sequence
  Synthetic Polynucleotide
cacaaagaacaacagtca

SEQ ID NO: 4459 - DNA, 20 bp, Artificial Sequence
  Synthetic Polynucleotide
catttactgctttgttgatc

SEQ ID NO: 4460 - DNA, 18 bp, Artificial Sequence
  Synthetic Polynucleotide
tgaacaggaagtttggga

SEQ ID NO: 4461 - DNA, 17 bp, Artificial Sequence
  Synthetic Polynucleotide
gcctacatcacaaatgc

SEQ ID NO: 4462 - DNA, 19 bp, Artificial Sequence
  Synthetic Polynucleotide
tttatgctctgctgaactt

SEQ ID NO: 4463 - DNA, 18 bp, Artificial Sequence
  Synthetic Polynucleotide
cagaacacatcatgggag

SEQ ID NO: 4464 - DNA, 17 bp, Artificial Sequence
  Synthetic Polynucleotide
tgtcacatgcacacagg

SEQ ID NO: 4465 - DNA, 18 bp, Artificial Sequence
  Synthetic Polynucleotide
tccatttacaggacgact

SEQ ID NO: 4466 - DNA, 19 bp, Artificial Sequence
  Synthetic Polynucleotide
gctgaaactattgacacta

SEQ ID NO: 4467 - DNA, 17 bp, Artificial Sequence
  Synthetic Polynucleotide
tctgagaatcgaacaca

SEQ ID NO: 4468 - DNA, 19 bp, Artificial Sequence
  Synthetic Polynucleotide
gtcaagggtctgatgatat

SEQ ID NO: 4469 - DNA, 18 bp, Artificial Sequence
  Synthetic Polynucleotide
gccacaatcaagggaatg

SEQ ID NO: 4470 - DNA, 18 bp, Artificial Sequence
  Synthetic Polynucleotide
aactgagaaagaaggtgc

SEQ ID NO: 4471 - DNA, 20 bp, Artificial Sequence
  Synthetic Polynucleotide
ggcttggtctgatgataact

SEQ ID NO: 4472 - DNA, 19 bp, Artificial Sequence
  Synthetic Polynucleotide
aggcaagatctgaagattg

SEQ ID NO: 4473 - DNA, 20 bp, Artificial Sequence
  Synthetic Polynucleotide
atcatatcaattctgaaggg

SEQ ID NO: 4474 - DNA, 19 bp, Artificial Sequence
  Synthetic Polynucleotide
ttgaagaactcacttggaa

SEQ ID NO: 4475 - DNA, 20 bp, Artificial Sequence
  Synthetic Polynucleotide
gaataagatgtctagtggta

SEQ ID NO: 4476 - DNA, 18 bp, Artificial Sequence
  Synthetic Polynucleotide
gagggatgtctgcaagaa

SEQ ID NO: 4477 - DNA, 20 bp, Artificial Sequence
  Synthetic Polynucleotide
cccattcggtaagagaacca

SEQ ID NO: 4478 - DNA, 18 bp, Artificial Sequence
  Synthetic Polynucleotide
taggcatttaggattgcg

SEQ ID NO: 4479 - DNA, 18 bp, Artificial Sequence
  Synthetic Polynucleotide
tggtcattatacagtccc

SEQ ID NO: 4480 - DNA, 19 bp, Artificial Sequence
  Synthetic Polynucleotide
gccatttaccaacctgaaa

SEQ ID NO: 4481 - DNA, 20 bp, Artificial Sequence
  Synthetic Polynucleotide
agttactcaccaatgtctac

SEQ ID NO: 4482 - DNA, 19 bp, Artificial Sequence
  Synthetic Polynucleotide
atgttcccaaacccaagac

SEQ ID NO: 4483 - DNA, 20 bp, Artificial Sequence
  Synthetic Polynucleotide
ggatcattcaactcctaatg

SEQ ID NO: 4484 - DNA, 20 bp, Artificial Sequence
  Synthetic Polynucleotide
tcatcacccaagaacaatca

SEQ ID NO: 4485 - DNA, 17 bp, Artificial Sequence
  Synthetic Polynucleotide
tcctggtctctgcttag

SEQ ID NO: 4486 - DNA, 19 bp, Artificial Sequence
  Synthetic Polynucleotide
agcaataaaagtgtggttg

SEQ ID NO: 4487 - DNA, 19 bp, Artificial Sequence
  Synthetic Polynucleotide
gaattgctttccctttcac

SEQ ID NO: 4488 - DNA, 20 bp, Artificial Sequence
  Synthetic Polynucleotide
aatctgtgatatgaagatgg

SEQ ID NO: 4489 - DNA, 19 bp, Artificial Sequence
  Synthetic Polynucleotide
ggtttaacagcccaaaaga

SEQ ID NO: 4490 - DNA, 18 bp, Artificial Sequence
  Synthetic Polynucleotide
gactgcatcatgtttgat

SEQ ID NO: 4491 - DNA, 17 bp, Artificial Sequence
  Synthetic Polynucleotide
cactgccaattctcaag

SEQ ID NO: 4492 - DNA, 20 bp, Artificial Sequence
  Synthetic Polynucleotide
tccactcatttctaaaatca

SEQ ID NO: 4493 - DNA, 17 bp, Artificial Sequence
  Synthetic Polynucleotide
ggaaggtcatgctcttt

SEQ ID NO: 4494 - DNA, 20 bp, Artificial Sequence
  Synthetic Polynucleotide
gatcatattgtctgcttcct

SEQ ID NO: 4495 - DNA, 17 bp, Artificial Sequence
  Synthetic Polynucleotide
tcctgctctctaatcta

SEQ ID NO: 4496 - DNA, 20 bp, Artificial Sequence
  Synthetic Polynucleotide
tggtcaattatagaggtgtt

SEQ ID NO: 4497 - DNA, 17 bp, Artificial Sequence
  Synthetic Polynucleotide
ttcttccaagaggtgcc

SEQ ID NO: 4498 - DNA, 17 bp, Artificial Sequence
  Synthetic Polynucleotide
ccctacgagaacatcct

SEQ ID NO: 4499 - DNA, 18 bp, Artificial Sequence
  Synthetic Polynucleotide
gaaatgtatgtactggcc

SEQ ID NO: 4500 - DNA, 20 bp, Artificial Sequence
  Synthetic Polynucleotide
tatatccaacgattccctat

SEQ ID NO: 4501 - DNA, 19 bp, Artificial Sequence
  Synthetic Polynucleotide
gatctactttcaaatcccc

SEQ ID NO: 4502 - DNA, 19 bp, Artificial Sequence
  Synthetic Polynucleotide
tgctcaaagtgttattctg

SEQ ID NO: 4503 - DNA, 20 bp, Artificial Sequence
  Synthetic Polynucleotide
atggaatgtccttgtacaga

SEQ ID NO: 4504 - DNA, 17 bp, Artificial Sequence
  Synthetic Polynucleotide
ttgacaacaaaatcggg

SEQ ID NO: 4505 - DNA, 19 bp, Artificial Sequence
  Synthetic Polynucleotide
atacccaattccctaactc

SEQ ID NO: 4506 - DNA, 20 bp, Artificial Sequence
  Synthetic Polynucleotide
ttgaacaatagtctccaaag

SEQ ID NO: 4507 - DNA, 20 bp, Artificial Sequence
  Synthetic Polynucleotide
tgtttcccaaataatgaaga

SEQ ID NO: 4508 - DNA, 18 bp, Artificial Sequence
  Synthetic Polynucleotide
atcctgggtcaaatggtc

SEQ ID NO: 4509 - DNA, 18 bp, Artificial Sequence
  Synthetic Polynucleotide
agcccgtccaacatcatt

SEQ ID NO: 4510 - DNA, 19 bp, Artificial Sequence
  Synthetic Polynucleotide
aacagatatccaccaaagt

SEQ ID NO: 4511 - DNA, 19 bp, Artificial Sequence
  Synthetic Polynucleotide
ttgaacactccttattgta

SEQ ID NO: 4512 - DNA, 19 bp, Artificial Sequence
  Synthetic Polynucleotide
atggaaaagagaagagcat

SEQ ID NO: 4513 - DNA, 17 bp, Artificial Sequence
  Synthetic Polynucleotide
tgacttctggtccaact

SEQ ID NO: 4514 - DNA, 19 bp, Artificial Sequence
  Synthetic Polynucleotide
ctggcattgcgtcctctat

SEQ ID NO: 4515 - DNA, 18 bp, Artificial Sequence
  Synthetic Polynucleotide
ctgtgaaggctggtgctt

SEQ ID NO: 4516 - DNA, 19 bp, Artificial Sequence
  Synthetic Polynucleotide
taaagtgtgtcttgaaggt

SEQ ID NO: 4517 - DNA, 18 bp, Artificial Sequence
  Synthetic Polynucleotide
tgtttgtactcgtcccaa

SEQ ID NO: 4518 - DNA, 17 bp, Artificial Sequence
  Synthetic Polynucleotide
tgagtctgtgtggctta

SEQ ID NO: 4519 - DNA, 17 bp, Artificial Sequence
  Synthetic Polynucleotide
atgtggcagatcatgtt

SEQ ID NO: 4520 - DNA, 19 bp, Artificial Sequence
  Synthetic Polynucleotide
gtccgaatttcaatctccc

SEQ ID NO: 4521 - DNA, 17 bp, Artificial Sequence
  Synthetic Polynucleotide
gactccgtgtccgttgg

SEQ ID NO: 4522 - DNA, 17 bp, Artificial Sequence
  Synthetic Polynucleotide
aactcattgtgtgcctg

SEQ ID NO: 4523 - DNA, 20 bp, Artificial Sequence
  Synthetic Polynucleotide
acatccctgtctgaagctca

SEQ ID NO: 4524 - DNA, 20 bp, Artificial Sequence
  Synthetic Polynucleotide
caatctcaaagctgaatcca

SEQ ID NO: 4525 - DNA, 18 bp, Artificial Sequence
  Synthetic Polynucleotide
caatcctgtgtgagaaag

SEQ ID NO: 4526 - DNA, 17 bp, Artificial Sequence
  Synthetic Polynucleotide
ctcatcccaaaccatga

SEQ ID NO: 4527 - DNA, 17 bp, Artificial Sequence
  Synthetic Polynucleotide
ttttcgtaggggttcct

SEQ ID NO: 4528 - DNA, 20 bp, Artificial Sequence
  Synthetic Polynucleotide
ccctaattgaataggtgact

SEQ ID NO: 4529 - DNA, 17 bp, Artificial Sequence
  Synthetic Polynucleotide
ggccagccagtcaatca

SEQ ID NO: 4530 - DNA, 19 bp, Artificial Sequence
  Synthetic Polynucleotide
cgagttgtgcctgtgacat

SEQ ID NO: 4531 - DNA, 17 bp, Artificial Sequence
  Synthetic Polynucleotide
caatgtcatgtggaagc

SEQ ID NO: 4532 - DNA, 17 bp, Artificial Sequence
  Synthetic Polynucleotide
gcaaagggatactacca

SEQ ID NO: 4533 - DNA, 19 bp, Artificial Sequence
  Synthetic Polynucleotide
ttcttgccactcgctctca

SEQ ID NO: 4534 - DNA, 18 bp, Artificial Sequence
  Synthetic Polynucleotide
caccgttcctatccaagg

SEQ ID NO: 4535 - DNA, 18 bp, Artificial Sequence
  Synthetic Polynucleotide
cctttaaccatgtctggg

SEQ ID NO: 4536 - DNA, 18 bp, Artificial Sequence
  Synthetic Polynucleotide
aacttttgacccaaaccg

SEQ ID NO: 4537 - DNA, 20 bp, Artificial Sequence
  Synthetic Polynucleotide
taaatgcttgaccatcgttg

SEQ ID NO: 4538 - DNA, 17 bp, Artificial Sequence
  Synthetic Polynucleotide
gtgccaaaacataccca

SEQ ID NO: 4539 - DNA, 19 bp, Artificial Sequence
  Synthetic Polynucleotide
ctgaatgcggataatgcag

SEQ ID NO: 4540 - DNA, 17 bp, Artificial Sequence
  Synthetic Polynucleotide
gaagacgaacatcacga

SEQ ID NO: 4541 - DNA, 18 bp, Artificial Sequence
  Synthetic Polynucleotide
ccagtcgctcgatacgtt

SEQ ID NO: 4542 - DNA, 18 bp, Artificial Sequence
  Synthetic Polynucleotide
ccgccgctctcatacact

SEQ ID NO: 4543 - DNA, 18 bp, Artificial Sequence
  Synthetic Polynucleotide
gacaagcatctcgtttca

SEQ ID NO: 4544 - DNA, 19 bp, Artificial Sequence
  Synthetic Polynucleotide
aggaggaaagattcttctc

SEQ ID NO: 4545 - DNA, 20 bp, Artificial Sequence
  Synthetic Polynucleotide
ggttccaaaattcttaccag

SEQ ID NO: 4546 - DNA, 18 bp, Artificial Sequence
  Synthetic Polynucleotide
gttttggtcctgtgacac

SEQ ID NO: 4547 - DNA, 17 bp, Artificial Sequence
  Synthetic Polynucleotide
cacagaagagcaactcc

SEQ ID NO: 4548 - DNA, 20 bp, Artificial Sequence
  Synthetic Polynucleotide
taccatgtattcctgcatct

SEQ ID NO: 4549 - DNA, 20 bp, Artificial Sequence
  Synthetic Polynucleotide
acttccaaggcgtggttgaa

SEQ ID NO: 4550 - DNA, 17 bp, Artificial Sequence
  Synthetic Polynucleotide
cctgtaccctcgatcct

SEQ ID NO: 4551 - DNA, 17 bp, Artificial Sequence
  Synthetic Polynucleotide
aatagggtgacggggtg

SEQ ID NO: 4552 - DNA, 18 bp, Artificial Sequence
  Synthetic Polynucleotide
ttggtagatcctcgaatc

SEQ ID NO: 4553 - DNA, 20 bp, Artificial Sequence
  Synthetic Polynucleotide
aggtgaggtttgtaagatct

SEQ ID NO: 4554 - DNA, 18 bp, Artificial Sequence
  Synthetic Polynucleotide
ctctgggatgtctgcacc

SEQ ID NO: 4555 - DNA, 20 bp, Artificial Sequence
  Synthetic Polynucleotide
gcagttagcaaaggaggtcg

SEQ ID NO: 4556 - DNA, 20 bp, Artificial Sequence
  Synthetic Polynucleotide
agccatagttattttggtcc

SEQ ID NO: 4557 - DNA, 19 bp, Artificial Sequence
  Synthetic Polynucleotide
aaattgaagaaaagccaga

SEQ ID NO: 4558 - DNA, 17 bp, Artificial Sequence
  Synthetic Polynucleotide
atgcacaagtttgacga

SEQ ID NO: 4559 - DNA, 20 bp, Artificial Sequence
  Synthetic Polynucleotide
tgtacttttgaaacatttgc

SEQ ID NO: 4560 - DNA, 17 bp, Artificial Sequence
  Synthetic Polynucleotide
atgggcttgtagaagtt

SEQ ID NO: 4561 - DNA, 17 bp, Artificial Sequence
  Synthetic Polynucleotide
aaagagtttctcaggga

SEQ ID NO: 4562 - DNA, 18 bp, Artificial Sequence
  Synthetic Polynucleotide
tggcgagcggtttgaaaa

SEQ ID NO: 4563 - DNA, 20 bp, Artificial Sequence
  Synthetic Polynucleotide
tgcgatttgtattcgtatcg

SEQ ID NO: 4564 - DNA, 17 bp, Artificial Sequence
  Synthetic Polynucleotide
tgcgttttgcacaattg

SEQ ID NO: 4565 - DNA, 19 bp, Artificial Sequence
  Synthetic Polynucleotide
gtatgtacggatcttcggc

SEQ ID NO: 4566 - DNA, 17 bp, Artificial Sequence
  Synthetic Polynucleotide
gtggaaatgacaccaca

SEQ ID NO: 4567 - DNA, 17 bp, Artificial Sequence
  Synthetic Polynucleotide
cacggtcttcgtatgga

SEQ ID NO: 4568 - DNA, 17 bp, Artificial Sequence
  Synthetic Polynucleotide
cccacttggctgactcg

SEQ ID NO: 4569 - DNA, 20 bp, Artificial Sequence
  Synthetic Polynucleotide
ggtcatgtataagacgtatg

SEQ ID NO: 4570 - DNA, 17 bp, Artificial Sequence
  Synthetic Polynucleotide
cccacatgttgctattg

SEQ ID NO: 4571 - DNA, 17 bp, Artificial Sequence
  Synthetic Polynucleotide
agttcacacggttcata

SEQ ID NO: 4572 - DNA, 18 bp, Artificial Sequence
  Synthetic Polynucleotide
acttatcaatctgtccgg

SEQ ID NO: 4573 - DNA, 19 bp, Artificial Sequence
  Synthetic Polynucleotide
agaagttctcccagatcac

SEQ ID NO: 4574 - DNA, 17 bp, Artificial Sequence
  Synthetic Polynucleotide
tggagcggtaaagagtt

SEQ ID NO: 4575 - DNA, 19 bp, Artificial Sequence
  Synthetic Polynucleotide
cttttggaaggtgcttcag

SEQ ID NO: 4576 - DNA, 17 bp, Artificial Sequence
  Synthetic Polynucleotide
atcaattttggcacggg

SEQ ID NO: 4577 - DNA, 19 bp, Artificial Sequence
  Synthetic Polynucleotide
ccaatttgatgtcgttgtg

SEQ ID NO: 4578 - DNA, 18 bp, Artificial Sequence
  Synthetic Polynucleotide
atggcgatttgtttgatt

SEQ ID NO: 4579 - DNA, 18 bp, Artificial Sequence
  Synthetic Polynucleotide
atgtattgtcgtatcggg

SEQ ID NO: 4580 - DNA, 19 bp, Artificial Sequence
  Synthetic Polynucleotide
cgattcttttcgttgagca

SEQ ID NO: 4581 - DNA, 19 bp, Artificial Sequence
  Synthetic Polynucleotide
tatgggtagtttgcgtaaa

SEQ ID NO: 4582 - DNA, 19 bp, Artificial Sequence
  Synthetic Polynucleotide
agtacattgagtttgttgc

SEQ ID NO: 4583 - DNA, 20 bp, Artificial Sequence
  Synthetic Polynucleotide
aaattttaattcccaccacc

SEQ ID NO: 4584 - DNA, 17 bp, Artificial Sequence
  Synthetic Polynucleotide
ttggaggggcttttaat

SEQ ID NO: 4585 - DNA, 17 bp, Artificial Sequence
  Synthetic Polynucleotide
cagatggtcgatgttct

SEQ ID NO: 4586 - DNA, 19 bp, Artificial Sequence
  Synthetic Polynucleotide
cgtagtcttttgatctccc

SEQ ID NO: 4587 - DNA, 17 bp, Artificial Sequence
  Synthetic Polynucleotide
gcagtttaccagaggcg

SEQ ID NO: 4588 - DNA, 19 bp, Artificial Sequence
  Synthetic Polynucleotide
gactttggtcgatgaataa

SEQ ID NO: 4589 - DNA, 17 bp, Artificial Sequence
  Synthetic Polynucleotide
aactttgaagcccgaca

SEQ ID NO: 4590 - DNA, 20 bp, Artificial Sequence
  Synthetic Polynucleotide
cagcaaaattcgtccgtatt

SEQ ID NO: 4591 - DNA, 17 bp, Artificial Sequence
  Synthetic Polynucleotide
agcgatagtacacgata

SEQ ID NO: 4592 - DNA, 18 bp, Artificial Sequence
  Synthetic Polynucleotide
tcatacctcatattgggg

SEQ ID NO: 4593 - DNA, 20 bp, Artificial Sequence
  Synthetic Polynucleotide
actacaatgtgggcatctta

SEQ ID NO: 4594 - DNA, 18 bp, Artificial Sequence
  Synthetic Polynucleotide
aagaggcactaaaagtga

SEQ ID NO: 4595 - DNA, 20 bp, Artificial Sequence
  Synthetic Polynucleotide
gttttgcctatgtatggtag

SEQ ID NO: 4596 - DNA, 18 bp, Artificial Sequence
  Synthetic Polynucleotide
gacataccacgactgttt

SEQ ID NO: 4597 - DNA, 18 bp, Artificial Sequence
  Synthetic Polynucleotide
accacgatgtttccgttc

SEQ ID NO: 4598 - DNA, 17 bp, Artificial Sequence
  Synthetic Polynucleotide
atctcacggaaatacga

SEQ ID NO: 4599 - DNA, 17 bp, Artificial Sequence
  Synthetic Polynucleotide
accccatccgcagttct

SEQ ID NO: 4600 - DNA, 18 bp, Artificial Sequence
  Synthetic Polynucleotide
aaacatgctgaggaacct

SEQ ID NO: 4601 - DNA, 18 bp, Artificial Sequence
  Synthetic Polynucleotide
tcctgctccatccaatag

SEQ ID NO: 4602 - DNA, 17 bp, Artificial Sequence
  Synthetic Polynucleotide
tggccgactacaatagg

SEQ ID NO: 4603 - DNA, 20 bp, Artificial Sequence
  Synthetic Polynucleotide
ctgaggttgtttcttgctgc

SEQ ID NO: 4604 - DNA, 18 bp, Artificial Sequence
  Synthetic Polynucleotide
caaaagagttcatggacc

SEQ ID NO: 4605 - DNA, 18 bp, Artificial Sequence
  Synthetic Polynucleotide
tctacccctttgggatac

SEQ ID NO: 4606 - DNA, 20 bp, Artificial Sequence
  Synthetic Polynucleotide
gttttcaatagtccacaggc

SEQ ID NO: 4607 - DNA, 20 bp, Artificial Sequence
  Synthetic Polynucleotide
cttcattcttgacaatgttc

SEQ ID NO: 4608 - DNA, 19 bp, Artificial Sequence
  Synthetic Polynucleotide
cagaggtgcaatcacacgg

SEQ ID NO: 4609 - DNA, 19 bp, Artificial Sequence
  Synthetic Polynucleotide
gatcttctcgcacgccttc

SEQ ID NO: 4610 - DNA, 19 bp, Artificial Sequence
  Synthetic Polynucleotide
cagcttacccacatcatat

SEQ ID NO: 4611 - DNA, 17 bp, Artificial Sequence
  Synthetic Polynucleotide
atccagggacgattacc

SEQ ID NO: 4612 - DNA, 18 bp, Artificial Sequence
  Synthetic Polynucleotide
aagaagatccccagacac

SEQ ID NO: 4613 - DNA, 20 bp, Artificial Sequence
  Synthetic Polynucleotide
gaaaccgaagaaaagaatgt

SEQ ID NO: 4614 - DNA, 17 bp, Artificial Sequence
  Synthetic Polynucleotide
taatcgtcgttgagacg

SEQ ID NO: 4615 - DNA, 17 bp, Artificial Sequence
  Synthetic Polynucleotide
gaaaccctccgaagagg

SEQ ID NO: 4616 - DNA, 17 bp, Artificial Sequence
  Synthetic Polynucleotide
cggctaaaatggtcagt

SEQ ID NO: 4617 - DNA, 20 bp, Artificial Sequence
  Synthetic Polynucleotide
acccgtaccctgaaactagc

SEQ ID NO: 4618 - DNA, 18 bp, Artificial Sequence
  Synthetic Polynucleotide
ccatgcacgaacccctaa

SEQ ID NO: 4619 - DNA, 17 bp, Artificial Sequence
  Synthetic Polynucleotide
gatagtcgtggttgaca

SEQ ID NO: 4620 - DNA, 17 bp, Artificial Sequence
  Synthetic Polynucleotide
gcgatgcctgcactctg

SEQ ID NO: 4621 - DNA, 18 bp, Artificial Sequence
  Synthetic Polynucleotide
tccatccagctaacggct

SEQ ID NO: 4622 - DNA, 19 bp, Artificial Sequence
  Synthetic Polynucleotide
tggagattatcagttcctt

SEQ ID NO: 4623 - DNA, 19 bp, Artificial Sequence
  Synthetic Polynucleotide
gagttactccttgctctct

SEQ ID NO: 4624 - DNA, 20 bp, Artificial Sequence
  Synthetic Polynucleotide
atctaaactctctccctgag

SEQ ID NO: 4625 - DNA, 17 bp, Artificial Sequence
  Synthetic Polynucleotide
aagtccatatgcccacc

SEQ ID NO: 4626 - DNA, 17 bp, Artificial Sequence
  Synthetic Polynucleotide
gcatcctaccttttggt

SEQ ID NO: 4627 - DNA, 18 bp, Artificial Sequence
  Synthetic Polynucleotide
agaggtttaagtcgaaga

SEQ ID NO: 4628 - DNA, 18 bp, Artificial Sequence
  Synthetic Polynucleotide
ggaggacccttcactagg

SEQ ID NO: 4629 - DNA, 20 bp, Artificial Sequence
  Synthetic Polynucleotide
attgcttttggtgatactaa

SEQ ID NO: 4630 - DNA, 18 bp, Artificial Sequence
  Synthetic Polynucleotide
tccacagttaagtaggta

SEQ ID NO: 4631 - DNA, 19 bp, Artificial Sequence
  Synthetic Polynucleotide
gcataaataccctttgaga

SEQ ID NO: 4632 - DNA, 17 bp, Artificial Sequence
  Synthetic Polynucleotide
agttgatgccacttacc

SEQ ID NO: 4633 - DNA, 20 bp, Artificial Sequence
  Synthetic Polynucleotide
ctttgtgccactattaccta

SEQ ID NO: 4634 - DNA, 19 bp, Artificial Sequence
  Synthetic Polynucleotide
tggtctccttagagatcac

SEQ ID NO: 4635 - DNA, 18 bp, Artificial Sequence
  Synthetic Polynucleotide
gttttactccttgaaccc

SEQ ID NO: 4636 - DNA, 17 bp, Artificial Sequence
  Synthetic Polynucleotide
tgcaattcctgttgaga

SEQ ID NO: 4637 - DNA, 20 bp, Artificial Sequence
  Synthetic Polynucleotide
tatggataaatacagacaca

SEQ ID NO: 4638 - DNA, 17 bp, Artificial Sequence
  Synthetic Polynucleotide
cttccgaagaggacaag

SEQ ID NO: 4639 - DNA, 20 bp, Artificial Sequence
  Synthetic Polynucleotide
tagagtcattggtctaagca

SEQ ID NO: 4640 - DNA, 19 bp, Artificial Sequence
  Synthetic Polynucleotide
gagttgttgttttcctagg

SEQ ID NO: 4641 - DNA, 20 bp, Artificial Sequence
  Synthetic Polynucleotide
ttgctttcaagtttgtcgtg

SEQ ID NO: 4642 - DNA, 19 bp, Artificial Sequence
  Synthetic Polynucleotide
agagacttccaatcgtttc

SEQ ID NO: 4643 - DNA, 20 bp, Artificial Sequence
  Synthetic Polynucleotide
tagcagttttgaatgagtac

SEQ ID NO: 4644 - DNA, 18 bp, Artificial Sequence
  Synthetic Polynucleotide
gtatctagcgaggagttt

SEQ ID NO: 4645 - DNA, 17 bp, Artificial Sequence
  Synthetic Polynucleotide
gagtcgtcgttgagacg

SEQ ID NO: 4646 - DNA, 18 bp, Artificial Sequence
  Synthetic Polynucleotide
tacccaaacttgattgtt

SEQ ID NO: 4647 - DNA, 18 bp, Artificial Sequence
  Synthetic Polynucleotide
cggtgatgaactttatgg

SEQ ID NO: 4648 - DNA, 20 bp, Artificial Sequence
  Synthetic Polynucleotide
acgtaggcattcatagcatt

SEQ ID NO: 4649 - DNA, 17 bp, Artificial Sequence
  Synthetic Polynucleotide
actttcgtgagctgatg

SEQ ID NO: 4650 - DNA, 18 bp, Artificial Sequence
  Synthetic Polynucleotide
ccttaggggcattcatgc

SEQ ID NO: 4651 - DNA, 19 bp, Artificial Sequence
  Synthetic Polynucleotide
ggttgaggtatagaatcct

SEQ ID NO: 4652 - DNA, 20 bp, Artificial Sequence
  Synthetic Polynucleotide
aactgaattggcatcaaact

SEQ ID NO: 4653 - DNA, 17 bp, Artificial Sequence
  Synthetic Polynucleotide
ctgcgatctttgtgacg

SEQ ID NO: 4654 - DNA, 19 bp, Artificial Sequence
  Synthetic Polynucleotide
ggtgagggcatgtacaaaa

SEQ ID NO: 4655 - DNA, 18 bp, Artificial Sequence
  Synthetic Polynucleotide
gagaaattcaaggaagcc

SEQ ID NO: 4656 - DNA, 20 bp, Artificial Sequence
  Synthetic Polynucleotide
taataggtacggctaattta

SEQ ID NO: 4657 - DNA, 18 bp, Artificial Sequence
  Synthetic Polynucleotide
tttccagaagttgaacgt

SEQ ID NO: 4658 - DNA, 19 bp, Artificial Sequence
  Synthetic Polynucleotide
tcatagaaataggcatcgt

SEQ ID NO: 4659 - DNA, 17 bp, Artificial Sequence
  Synthetic Polynucleotide
tggcggaatacaggcaa

SEQ ID NO: 4660 - DNA, 17 bp, Artificial Sequence
  Synthetic Polynucleotide
accaccatcgatttcaa

SEQ ID NO: 4661 - DNA, 19 bp, Artificial Sequence
  Synthetic Polynucleotide
atggtgatttccagaagtt

SEQ ID NO: 4662 - DNA, 17 bp, Artificial Sequence
  Synthetic Polynucleotide
ccggttgttttcgacaa

SEQ ID NO: 4663 - DNA, 17 bp, Artificial Sequence
  Synthetic Polynucleotide
aaactgtgcggaagcga

SEQ ID NO: 4664 - DNA, 19 bp, Artificial Sequence
  Synthetic Polynucleotide
gaacaggtaggagcggaca

SEQ ID NO: 4665 - DNA, 18 bp, Artificial Sequence
  Synthetic Polynucleotide
ggcattctccaaggtact

SEQ ID NO: 4666 - DNA, 19 bp, Artificial Sequence
  Synthetic Polynucleotide
tacacataactgagaacac

SEQ ID NO: 4667 - DNA, 19 bp, Artificial Sequence
  Synthetic Polynucleotide
aatcccgagttgttgaaac

SEQ ID NO: 4668 - DNA, 20 bp, Artificial Sequence
  Synthetic Polynucleotide
acgagttaaccaaaaggatt

SEQ ID NO: 4669 - DNA, 19 bp, Artificial Sequence
  Synthetic Polynucleotide
agacttactagaaccagta

SEQ ID NO: 4670 - DNA, 19 bp, Artificial Sequence
  Synthetic Polynucleotide
attgtgaggaaactttgtc

SEQ ID NO: 4671 - DNA, 19 bp, Artificial Sequence
  Synthetic Polynucleotide
gagggaaaagagagttgta

SEQ ID NO: 4672 - DNA, 19 bp, Artificial Sequence
  Synthetic Polynucleotide
tcacccgagtgtagtcatt

SEQ ID NO: 4673 - DNA, 18 bp, Artificial Sequence
  Synthetic Polynucleotide
accagagacacttgattt

SEQ ID NO: 4674 - DNA, 17 bp, Artificial Sequence
  Synthetic Polynucleotide
ccgggagtgggtgatat

SEQ ID NO: 4675 - DNA, 17 bp, Artificial Sequence
  Synthetic Polynucleotide
caagtccgaagacgata

SEQ ID NO: 4676 - DNA, 19 bp, Artificial Sequence
  Synthetic Polynucleotide
cggttcttccataatctgg

SEQ ID NO: 4677 - DNA, 17 bp, Artificial Sequence
  Synthetic Polynucleotide
cgcatacacaggcggag

SEQ ID NO: 4678 - DNA, 17 bp, Artificial Sequence
  Synthetic Polynucleotide
cactcaggctcacaaag

SEQ ID NO: 4679 - DNA, 19 bp, Artificial Sequence
  Synthetic Polynucleotide
cggggatgctttcacttac

SEQ ID NO: 4680 - DNA, 20 bp, Artificial Sequence
  Synthetic Polynucleotide
gaaatcacatcagacatctt

SEQ ID NO: 4681 - DNA, 20 bp, Artificial Sequence
  Synthetic Polynucleotide
tattttatgggtgtttgagg

SEQ ID NO: 4682 - DNA, 20 bp, Artificial Sequence
  Synthetic Polynucleotide
tgtttggaacagtccattca

SEQ ID NO: 4683 - DNA, 18 bp, Artificial Sequence
  Synthetic Polynucleotide
gaatgtcacgaaaaggta

SEQ ID NO: 4684 - DNA, 20 bp, Artificial Sequence
  Synthetic Polynucleotide
atgaagtcgatcctatcagg

SEQ ID NO: 4685 - DNA, 18 bp, Artificial Sequence
  Synthetic Polynucleotide
aagttcttcagggagcat

SEQ ID NO: 4686 - DNA, 19 bp, Artificial Sequence
  Synthetic Polynucleotide
cctatacttaactcaggct

SEQ ID NO: 4687 - DNA, 19 bp, Artificial Sequence
  Synthetic Polynucleotide
tcacgggtctccatcagtt

SEQ ID NO: 4688 - DNA, 19 bp, Artificial Sequence
  Synthetic Polynucleotide
ggcaatttgggtccagact

SEQ ID NO: 4689 - DNA, 17 bp, Artificial Sequence
  Synthetic Polynucleotide
aagttgtggggaaaact

SEQ ID NO: 4690 - DNA, 19 bp, Artificial Sequence
  Synthetic Polynucleotide
atctctcagaaggggtgaa

SEQ ID NO: 4691 - DNA, 17 bp, Artificial Sequence
  Synthetic Polynucleotide
gtttgcagggtttgaag

SEQ ID NO: 4692 - DNA, 19 bp, Artificial Sequence
  Synthetic Polynucleotide
gtctaagcgggaggtaact

SEQ ID NO: 4693 - DNA, 18 bp, Artificial Sequence
  Synthetic Polynucleotide
gtacctccagtaattcca

SEQ ID NO: 4694 - DNA, 17 bp, Artificial Sequence
  Synthetic Polynucleotide
gtctcggggtccatctc

SEQ ID NO: 4695 - DNA, 17 bp, Artificial Sequence
  Synthetic Polynucleotide
tagtggctttgtctagg

SEQ ID NO: 4696 - DNA, 19 bp, Artificial Sequence
  Synthetic Polynucleotide
tagcttcaacagctaagtg

SEQ ID NO: 4697 - DNA, 17 bp, Artificial Sequence
  Synthetic Polynucleotide
cctagtagcggggtatt

SEQ ID NO: 4698 - DNA, 19 bp, Artificial Sequence
  Synthetic Polynucleotide
cactaatctcagtggtgga

SEQ ID NO: 4699 - DNA, 17 bp, Artificial Sequence
  Synthetic Polynucleotide
ggggcacagtagttatg

SEQ ID NO: 4700 - DNA, 18 bp, Artificial Sequence
  Synthetic Polynucleotide
gtgatcaacgaaaacgcg

SEQ ID NO: 4701 - DNA, 20 bp, Artificial Sequence
  Synthetic Polynucleotide
ctttccagttttgaattcct

SEQ ID NO: 4702 - DNA, 18 bp, Artificial Sequence
  Synthetic Polynucleotide
ttctatattctcgggagc

SEQ ID NO: 4703 - DNA, 18 bp, Artificial Sequence
  Synthetic Polynucleotide
agtgtttcagtatggccg

SEQ ID NO: 4704 - DNA, 18 bp, Artificial Sequence
  Synthetic Polynucleotide
tccttgaaaagcaatcaa

SEQ ID NO: 4705 - DNA, 18 bp, Artificial Sequence
  Synthetic Polynucleotide
tagtagtagactccttga

SEQ ID NO: 4706 - DNA, 18 bp, Artificial Sequence
  Synthetic Polynucleotide
ggttaagctcactaagga

SEQ ID NO: 4707 - DNA, 19 bp, Artificial Sequence
  Synthetic Polynucleotide
actgaagcaataagaggta

SEQ ID NO: 4708 - DNA, 20 bp, Artificial Sequence
  Synthetic Polynucleotide
tcatcatatttcttgagtga

SEQ ID NO: 4709 - DNA, 19 bp, Artificial Sequence
  Synthetic Polynucleotide
acttatgaacaggtttgca

SEQ ID NO: 4710 - DNA, 19 bp, Artificial Sequence
  Synthetic Polynucleotide
acaacaacaaaggcactga

SEQ ID NO: 4711 - DNA, 18 bp, Artificial Sequence
  Synthetic Polynucleotide
cagttttgatgtcttgct

SEQ ID NO: 4712 - DNA, 20 bp, Artificial Sequence
  Synthetic Polynucleotide
tagtagtatgctccctaaaa

SEQ ID NO: 4713 - DNA, 20 bp, Artificial Sequence
  Synthetic Polynucleotide
gtagtagactccctaaagag

SEQ ID NO: 4714 - DNA, 19 bp, Artificial Sequence
  Synthetic Polynucleotide
actgggcatccaaatggct

SEQ ID NO: 4715 - DNA, 18 bp, Artificial Sequence
  Synthetic Polynucleotide
gtcacaaacaaccaggat

SEQ ID NO: 4716 - DNA, 18 bp, Artificial Sequence
  Synthetic Polynucleotide
caaagctccctagagata

SEQ ID NO: 4717 - DNA, 19 bp, Artificial Sequence
  Synthetic Polynucleotide
aactctcggacccactgtt

SEQ ID NO: 4718 - DNA, 19 bp, Artificial Sequence
  Synthetic Polynucleotide
ccttcttcattttcttggt

SEQ ID NO: 4719 - DNA, 18 bp, Artificial Sequence
  Synthetic Polynucleotide
aaaggaaatggacttgtg

SEQ ID NO: 4720 - DNA, 17 bp, Artificial Sequence
  Synthetic Polynucleotide
gcagacccatatcacaa

SEQ ID NO: 4721 - DNA, 20 bp, Artificial Sequence
  Synthetic Polynucleotide
tcttcttctgatgaaaagct

SEQ ID NO: 4722 - DNA, 17 bp, Artificial Sequence
  Synthetic Polynucleotide
cctaccacccacccatt

SEQ ID NO: 4723 - DNA, 20 bp, Artificial Sequence
  Synthetic Polynucleotide
aacaacgatcttaccatcca

SEQ ID NO: 4724 - DNA, 20 bp, Artificial Sequence
  Synthetic Polynucleotide
cacattgtaaatgtcaaaga

SEQ ID NO: 4725 - DNA, 17 bp, Artificial Sequence
  Synthetic Polynucleotide
aactgtcaccccaatgg

SEQ ID NO: 4726 - DNA, 17 bp, Artificial Sequence
  Synthetic Polynucleotide
ctgacacacttgtttcc

SEQ ID NO: 4727 - DNA, 18 bp, Artificial Sequence
  Synthetic Polynucleotide
agtagtagactccgcaag

SEQ ID NO: 4728 - DNA, 17 bp, Artificial Sequence
  Synthetic Polynucleotide
gaccccaccaaaagtaa

SEQ ID NO: 4729 - DNA, 19 bp, Artificial Sequence
  Synthetic Polynucleotide
ttttcaacgatgtaccaca

SEQ ID NO: 4730 - DNA, 17 bp, Artificial Sequence
  Synthetic Polynucleotide
actccatgtcagcaact

SEQ ID NO: 4731 - DNA, 18 bp, Artificial Sequence
  Synthetic Polynucleotide
cagatgtactctcctgtc

SEQ ID NO: 4732 - DNA, 19 bp, Artificial Sequence
  Synthetic Polynucleotide
ctggtataagaacccatcc

SEQ ID NO: 4733 - DNA, 17 bp, Artificial Sequence
  Synthetic Polynucleotide
aagcagtcaatcagcaa

SEQ ID NO: 4734 - DNA, 18 bp, Artificial Sequence
  Synthetic Polynucleotide
tccgtagtcaggcagtgg

SEQ ID NO: 4735 - DNA, 20 bp, Artificial Sequence
  Synthetic Polynucleotide
aatacatttgatccagaagc

SEQ ID NO: 4736 - DNA, 17 bp, Artificial Sequence
  Synthetic Polynucleotide
aaagatatcgttgccgc

SEQ ID NO: 4737 - DNA, 17 bp, Artificial Sequence
  Synthetic Polynucleotide
ccgcttacgcccacagt

SEQ ID NO: 4738 - DNA, 18 bp, Artificial Sequence
  Synthetic Polynucleotide
attcccacccataaatgt

SEQ ID NO: 4739 - DNA, 18 bp, Artificial Sequence
  Synthetic Polynucleotide
tcaatgggaatacaactg

SEQ ID NO: 4740 - DNA, 18 bp, Artificial Sequence
  Synthetic Polynucleotide
ggatagctcagtttcaca

SEQ ID NO: 4741 - DNA, 20 bp, Artificial Sequence
  Synthetic Polynucleotide
aaatgtccttgatgtgaatg

SEQ ID NO: 4742 - DNA, 18 bp, Artificial Sequence
  Synthetic Polynucleotide
gttgaggtagtgttgttg

SEQ ID NO: 4743 - DNA, 19 bp, Artificial Sequence
  Synthetic Polynucleotide
taggatgtcaccttaagtg

SEQ ID NO: 4744 - DNA, 17 bp, Artificial Sequence
  Synthetic Polynucleotide
tctgtccccaaccaccc

SEQ ID NO: 4745 - DNA, 18 bp, Artificial Sequence
  Synthetic Polynucleotide
gatggtcttaccctccac

SEQ ID NO: 4746 - DNA, 19 bp, Artificial Sequence
  Synthetic Polynucleotide
gacatatgctgattgaagc

SEQ ID NO: 4747 - DNA, 18 bp, Artificial Sequence
  Synthetic Polynucleotide
ctgtgaagtcaggatggt

SEQ ID NO: 4748 - DNA, 17 bp, Artificial Sequence
  Synthetic Polynucleotide
ctccagctaagtgctat

SEQ ID NO: 4749 - DNA, 19 bp, Artificial Sequence
  Synthetic Polynucleotide
atgcaatagatgctgaaat

SEQ ID NO: 4750 - DNA, 17 bp, Artificial Sequence
  Synthetic Polynucleotide
ccccaaccagtctcata

SEQ ID NO: 4751 - DNA, 18 bp, Artificial Sequence
  Synthetic Polynucleotide
tggatggatgctacattt

SEQ ID NO: 4752 - DNA, 20 bp, Artificial Sequence
  Synthetic Polynucleotide
tagaatgatgatttctttcg

SEQ ID NO: 4753 - DNA, 18 bp, Artificial Sequence
  Synthetic Polynucleotide
ggatgcagaaaagcagta

SEQ ID NO: 4754 - DNA, 17 bp, Artificial Sequence
  Synthetic Polynucleotide
gctttgaccttcgccgc

SEQ ID NO: 4755 - DNA, 18 bp, Artificial Sequence
  Synthetic Polynucleotide
caatacatttgaccctga

SEQ ID NO: 4756 - DNA, 19 bp, Artificial Sequence
  Synthetic Polynucleotide
actgtaaatttgacccctg

SEQ ID NO: 4757 - DNA, 18 bp, Artificial Sequence
  Synthetic Polynucleotide
ttgctagagtcttcttcc

SEQ ID NO: 4758 - DNA, 20 bp, Artificial Sequence
  Synthetic Polynucleotide
aatttgaccccaccaaaagt

SEQ ID NO: 4759 - DNA, 20 bp, Artificial Sequence
  Synthetic Polynucleotide
ttttgaagatgtaccacaac

SEQ ID NO: 4760 - DNA, 19 bp, Artificial Sequence
  Synthetic Polynucleotide
tgagttcttgatatgcagt

SEQ ID NO: 4761 - DNA, 20 bp, Artificial Sequence
  Synthetic Polynucleotide
cctttcaatagattcaggtt

SEQ ID NO: 4762 - DNA, 19 bp, Artificial Sequence
  Synthetic Polynucleotide
tgctccttgaaaagcaatc

SEQ ID NO: 4763 - DNA, 18 bp, Artificial Sequence
  Synthetic Polynucleotide
actccttgagaagctact

SEQ ID NO: 4764 - DNA, 19 bp, Artificial Sequence
  Synthetic Polynucleotide
atatcgcactcatggcaat

SEQ ID NO: 4765 - DNA, 17 bp, Artificial Sequence
  Synthetic Polynucleotide
atggctagttgctgatt

SEQ ID NO: 4766 - DNA, 19 bp, Artificial Sequence
  Synthetic Polynucleotide
gttacactggtaaagttgg

SEQ ID NO: 4767 - DNA, 18 bp, Artificial Sequence
  Synthetic Polynucleotide
gcagcttcaatgaaatta

SEQ ID NO: 4768 - DNA, 19 bp, Artificial Sequence
  Synthetic Polynucleotide
taatgctgtcggtggacac

SEQ ID NO: 4769 - DNA, 18 bp, Artificial Sequence
  Synthetic Polynucleotide
ctgctgagacattcatgg

SEQ ID NO: 4770 - DNA, 19 bp, Artificial Sequence
  Synthetic Polynucleotide
taatggtcaatgtattccc

SEQ ID NO: 4771 - DNA, 20 bp, Artificial Sequence
  Synthetic Polynucleotide
accatagagggaactgaaac

SEQ ID NO: 4772 - DNA, 20 bp, Artificial Sequence
  Synthetic Polynucleotide
cattttgaattccgttttca

SEQ ID NO: 4773 - DNA, 19 bp, Artificial Sequence
  Synthetic Polynucleotide
atgaggaagaacaactcgt

SEQ ID NO: 4774 - DNA, 17 bp, Artificial Sequence
  Synthetic Polynucleotide
ggtagacttctggcccg

SEQ ID NO: 4775 - DNA, 19 bp, Artificial Sequence
  Synthetic Polynucleotide
gaagttacgcttaaccttg

SEQ ID NO: 4776 - DNA, 19 bp, Artificial Sequence
  Synthetic Polynucleotide
aaatgatgcaggcacacgg

SEQ ID NO: 4777 - DNA, 19 bp, Artificial Sequence
  Synthetic Polynucleotide
aatctacatgcacccctgt

SEQ ID NO: 4778 - DNA, 20 bp, Artificial Sequence
  Synthetic Polynucleotide
gtagtttggatcagaatcac

SEQ ID NO: 4779 - DNA, 19 bp, Artificial Sequence
  Synthetic Polynucleotide
agcaagataaaacccaacg

SEQ ID NO: 4780 - DNA, 18 bp, Artificial Sequence
  Synthetic Polynucleotide
tgagacaacagaaagagc

SEQ ID NO: 4781 - DNA, 20 bp, Artificial Sequence
  Synthetic Polynucleotide
gaggctaaatacttggagaa

SEQ ID NO: 4782 - DNA, 20 bp, Artificial Sequence
  Synthetic Polynucleotide
taggaaaagtttgcactgtg

SEQ ID NO: 4783 - DNA, 20 bp, Artificial Sequence
  Synthetic Polynucleotide
agagtttcactgtaatgctc

SEQ ID NO: 4784 - DNA, 20 bp, Artificial Sequence
  Synthetic Polynucleotide
acacacatagcttggattac

SEQ ID NO: 4785 - DNA, 20 bp, Artificial Sequence
  Synthetic Polynucleotide
tcaaaacataaagagctagg

SEQ ID NO: 4786 - DNA, 19 bp, Artificial Sequence
  Synthetic Polynucleotide
tgatgaacaatacaggcac

SEQ ID NO: 4787 - DNA, 20 bp, Artificial Sequence
  Synthetic Polynucleotide
tttctgctatcccaggttgg

SEQ ID NO: 4788 - DNA, 19 bp, Artificial Sequence
  Synthetic Polynucleotide
ctattgctcccctaatttc

SEQ ID NO: 4789 - DNA, 20 bp, Artificial Sequence
  Synthetic Polynucleotide
gtgtcgctagaattttcttc

SEQ ID NO: 4790 - DNA, 17 bp, Artificial Sequence
  Synthetic Polynucleotide
gctgtgtattggggaaa

SEQ ID NO: 4791 - DNA, 19 bp, Artificial Sequence
  Synthetic Polynucleotide
gggtatgtggcatttattg

SEQ ID NO: 4792 - DNA, 18 bp, Artificial Sequence
  Synthetic Polynucleotide
aaacaccatgtctaacgt

SEQ ID NO: 4793 - DNA, 18 bp, Artificial Sequence
  Synthetic Polynucleotide
acattcaacccataagca

SEQ ID NO: 4794 - DNA, 18 bp, Artificial Sequence
  Synthetic Polynucleotide
atcatgttgtgcaatagc

SEQ ID NO: 4795 - DNA, 17 bp, Artificial Sequence
  Synthetic Polynucleotide
agggcagagacaatctt

SEQ ID NO: 4796 - DNA, 19 bp, Artificial Sequence
  Synthetic Polynucleotide
ccaaggagaacatagtcaa

SEQ ID NO: 4797 - DNA, 20 bp, Artificial Sequence
  Synthetic Polynucleotide
caaaagtgaagtcagcactc

SEQ ID NO: 4798 - DNA, 17 bp, Artificial Sequence
  Synthetic Polynucleotide
tgttcgttgaggagaag

SEQ ID NO: 4799 - DNA, 19 bp, Artificial Sequence
  Synthetic Polynucleotide
atgcattcaaagaactcac

SEQ ID NO: 4800 - DNA, 19 bp, Artificial Sequence
  Synthetic Polynucleotide
tgaagccaatttctgagct

SEQ ID NO: 4801 - DNA, 18 bp, Artificial Sequence
  Synthetic Polynucleotide
ctggaatgagcaccctca

SEQ ID NO: 4802 - DNA, 17 bp, Artificial Sequence
  Synthetic Polynucleotide
tcagaccaatcatgctt

SEQ ID NO: 4803 - DNA, 19 bp, Artificial Sequence
  Synthetic Polynucleotide
agtagactccgagatagag

SEQ ID NO: 4804 - DNA, 18 bp, Artificial Sequence
  Synthetic Polynucleotide
ttgcatcatcaagaggta

SEQ ID NO: 4805 - DNA, 19 bp, Artificial Sequence
  Synthetic Polynucleotide
gagtttgaggaagatcaga

SEQ ID NO: 4806 - DNA, 17 bp, Artificial Sequence
  Synthetic Polynucleotide
gaaggtccagtcatctg

SEQ ID NO: 4807 - DNA, 18 bp, Artificial Sequence
  Synthetic Polynucleotide
gtgcaggaagcagatctt

SEQ ID NO: 4808 - DNA, 18 bp, Artificial Sequence
  Synthetic Polynucleotide
ccgcaagatgttaagaca

SEQ ID NO: 4809 - DNA, 19 bp, Artificial Sequence
  Synthetic Polynucleotide
agtatgaaacaagttgggg

SEQ ID NO: 4810 - DNA, 18 bp, Artificial Sequence
  Synthetic Polynucleotide
gcctccaccagagcatta

SEQ ID NO: 4811 - DNA, 19 bp, Artificial Sequence
  Synthetic Polynucleotide
gcatccctgtgtgatagag

SEQ ID NO: 4812 - DNA, 18 bp, Artificial Sequence
  Synthetic Polynucleotide
attcaggcagtgaacatc

SEQ ID NO: 4813 - DNA, 20 bp, Artificial Sequence
  Synthetic Polynucleotide
taagaataccagaagctatg

SEQ ID NO: 4814 - DNA, 18 bp, Artificial Sequence
  Synthetic Polynucleotide
gcaacaaaagcaaagctt

SEQ ID NO: 4815 - DNA, 18 bp, Artificial Sequence
  Synthetic Polynucleotide
ccatcattgtgcaaatct

SEQ ID NO: 4816 - DNA, 20 bp, Artificial Sequence
  Synthetic Polynucleotide
gaggtagtagaatcgtacac

SEQ ID NO: 4817 - DNA, 19 bp, Artificial Sequence
  Synthetic Polynucleotide
tggggtaggtaagtttact

SEQ ID NO: 4818 - DNA, 20 bp, Artificial Sequence
  Synthetic Polynucleotide
tcatccattgtaaatccttt

SEQ ID NO: 4819 - DNA, 18 bp, Artificial Sequence
  Synthetic Polynucleotide
atgtctaaggtcaagctc

SEQ ID NO: 4820 - DNA, 19 bp, Artificial Sequence
  Synthetic Polynucleotide
aaaagcctcgtaataagca

SEQ ID NO: 4821 - DNA, 17 bp, Artificial Sequence
  Synthetic Polynucleotide
tgctgccatgatactga

SEQ ID NO: 4822 - DNA, 19 bp, Artificial Sequence
  Synthetic Polynucleotide
tacaaaggttttcttcacc

SEQ ID NO: 4823 - DNA, 18 bp, Artificial Sequence
  Synthetic Polynucleotide
ggcattttcagaaggtgg

SEQ ID NO: 4824 - DNA, 19 bp, Artificial Sequence
  Synthetic Polynucleotide
tccaacgaatatctctcta

SEQ ID NO: 4825 - DNA, 18 bp, Artificial Sequence
  Synthetic Polynucleotide
agataaagagaggtgcca

SEQ ID NO: 4826 - DNA, 18 bp, Artificial Sequence
  Synthetic Polynucleotide
cacatcaaggacatttcc

SEQ ID NO: 4827 - DNA, 19 bp, Artificial Sequence
  Synthetic Polynucleotide
atgagccaactcagggaaa

SEQ ID NO: 4828 - DNA, 19 bp, Artificial Sequence
  Synthetic Polynucleotide
aagtaggacactctgttaa

SEQ ID NO: 4829 - DNA, 20 bp, Artificial Sequence
  Synthetic Polynucleotide
tgtgttcagtttggagaaga

SEQ ID NO: 4830 - DNA, 17 bp, Artificial Sequence
  Synthetic Polynucleotide
tagtagtatgctccgca

SEQ ID NO: 4831 - DNA, 19 bp, Artificial Sequence
  Synthetic Polynucleotide
ctgcatttcattgttatgg

SEQ ID NO: 4832 - DNA, 18 bp, Artificial Sequence
  Synthetic Polynucleotide
ctcggtgatagatggaaa

SEQ ID NO: 4833 - DNA, 18 bp, Artificial Sequence
  Synthetic Polynucleotide
attgctgttcctcgtgtg

SEQ ID NO: 4834 - DNA, 20 bp, Artificial Sequence
  Synthetic Polynucleotide
caattacattgatactgcct

SEQ ID NO: 4835 - DNA, 20 bp, Artificial Sequence
  Synthetic Polynucleotide
cagaatcaaaatctgcaacc

SEQ ID NO: 4836 - DNA, 18 bp, Artificial Sequence
  Synthetic Polynucleotide
tagtagtctaggtcacag

SEQ ID NO: 4837 - DNA, 19 bp, Artificial Sequence
  Synthetic Polynucleotide
tggccccattcaagaaact

SEQ ID NO: 4838 - DNA, 20 bp, Artificial Sequence
  Synthetic Polynucleotide
agatagatcccggtttacta

SEQ ID NO: 4839 - DNA, 18 bp, Artificial Sequence
  Synthetic Polynucleotide
ttgccacaaaagattcat

SEQ ID NO: 4840 - DNA, 19 bp, Artificial Sequence
  Synthetic Polynucleotide
ctcttggagaatcacaaaa

SEQ ID NO: 4841 - DNA, 19 bp, Artificial Sequence
  Synthetic Polynucleotide
ctagctgcaagaatgatag

SEQ ID NO: 4842 - DNA, 20 bp, Artificial Sequence
  Synthetic Polynucleotide
cattacttactgcatcaact

SEQ ID NO: 4843 - DNA, 19 bp, Artificial Sequence
  Synthetic Polynucleotide
gtattgaagtttggaggtg

SEQ ID NO: 4844 - DNA, 17 bp, Artificial Sequence
  Synthetic Polynucleotide
tgctgtttcaaccacta

SEQ ID NO: 4845 - DNA, 19 bp, Artificial Sequence
  Synthetic Polynucleotide
agtccagtttgtctgtatc

SEQ ID NO: 4846 - DNA, 19 bp, Artificial Sequence
  Synthetic Polynucleotide
tccgcaagatatagaaata

SEQ ID NO: 4847 - DNA, 19 bp, Artificial Sequence
  Synthetic Polynucleotide
catcatcaatagaaggtgc

SEQ ID NO: 4848 - DNA, 20 bp, Artificial Sequence
  Synthetic Polynucleotide
ttcttcataaatctgtcagc

SEQ ID NO: 4849 - DNA, 20 bp, Artificial Sequence
  Synthetic Polynucleotide
tacaaagaaactaaaggtga

SEQ ID NO: 4850 - DNA, 19 bp, Artificial Sequence
  Synthetic Polynucleotide
cttgtctactgtctaggtc

SEQ ID NO: 4851 - DNA, 17 bp, Artificial Sequence
  Synthetic Polynucleotide
tgagcttgattgttgct

SEQ ID NO: 4852 - DNA, 19 bp, Artificial Sequence
  Synthetic Polynucleotide
gcaatttcatcctatcaga

SEQ ID NO: 4853 - DNA, 20 bp, Artificial Sequence
  Synthetic Polynucleotide
gtcctaaacttaatctggtt

SEQ ID NO: 4854 - DNA, 20 bp, Artificial Sequence
  Synthetic Polynucleotide
aaaacattccgttgagttat

SEQ ID NO: 4855 - DNA, 18 bp, Artificial Sequence
  Synthetic Polynucleotide
tggtgaatgggtgacatt

SEQ ID NO: 4856 - DNA, 19 bp, Artificial Sequence
  Synthetic Polynucleotide
aaatctacagacccggtga

SEQ ID NO: 4857 - DNA, 20 bp, Artificial Sequence
  Synthetic Polynucleotide
ctgaagacatgatgcaattc

SEQ ID NO: 4858 - DNA, 17 bp, Artificial Sequence
  Synthetic Polynucleotide
caagtgctctcgaacat

SEQ ID NO: 4859 - DNA, 18 bp, Artificial Sequence
  Synthetic Polynucleotide
gataaagcatgactggtc

SEQ ID NO: 4860 - DNA, 17 bp, Artificial Sequence
  Synthetic Polynucleotide
aagatatcgttgccgca

SEQ ID NO: 4861 - DNA, 17 bp, Artificial Sequence
  Synthetic Polynucleotide
aaggacataggtttccg

SEQ ID NO: 4862 - DNA, 18 bp, Artificial Sequence
  Synthetic Polynucleotide
tgtgctccactgaataca

SEQ ID NO: 4863 - DNA, 20 bp, Artificial Sequence
  Synthetic Polynucleotide
agttaggatcttcttcctca

SEQ ID NO: 4864 - DNA, 18 bp, Artificial Sequence
  Synthetic Polynucleotide
gcaggttgatgatgtgca

SEQ ID NO: 4865 - DNA, 19 bp, Artificial Sequence
  Synthetic Polynucleotide
gctgtgaagtaatgatacc

SEQ ID NO: 4866 - DNA, 20 bp, Artificial Sequence
  Synthetic Polynucleotide
atgatgcctaaatcactcca

SEQ ID NO: 4867 - DNA, 19 bp, Artificial Sequence
  Synthetic Polynucleotide
gaacatcttttgttttgga

SEQ ID NO: 4868 - DNA, 18 bp, Artificial Sequence
  Synthetic Polynucleotide
attgacctcttcaaagga

SEQ ID NO: 4869 - DNA, 18 bp, Artificial Sequence
  Synthetic Polynucleotide
gcttgagcctgatgacca

SEQ ID NO: 4870 - DNA, 18 bp, Artificial Sequence
  Synthetic Polynucleotide
tcccacttaatatcccca

SEQ ID NO: 4871 - DNA, 20 bp, Artificial Sequence
  Synthetic Polynucleotide
attcaatattacagaacccc

SEQ ID NO: 4872 - DNA, 17 bp, Artificial Sequence
  Synthetic Polynucleotide
caagtgacctctccagg

SEQ ID NO: 4873 - DNA, 17 bp, Artificial Sequence
  Synthetic Polynucleotide
cacaaaggtccctagtt

SEQ ID NO: 4874 - DNA, 20 bp, Artificial Sequence
  Synthetic Polynucleotide
agcaagtacctccctgaatg

SEQ ID NO: 4875 - DNA, 17 bp, Artificial Sequence
  Synthetic Polynucleotide
tgcaaaggttgtgcctg

SEQ ID NO: 4876 - DNA, 20 bp, Artificial Sequence
  Synthetic Polynucleotide
ccaatatctccctaagcctg

SEQ ID NO: 4877 - DNA, 17 bp, Artificial Sequence
  Synthetic Polynucleotide
cattgactgtgctgaag

SEQ ID NO: 4878 - DNA, 17 bp, Artificial Sequence
  Synthetic Polynucleotide
catccctctcttggata

SEQ ID NO: 4879 - DNA, 20 bp, Artificial Sequence
  Synthetic Polynucleotide
atgcgaagaatttgggtgcc

SEQ ID NO: 4880 - DNA, 20 bp, Artificial Sequence
  Synthetic Polynucleotide
acacagtatgtcttttcata

SEQ ID NO: 4881 - DNA, 20 bp, Artificial Sequence
  Synthetic Polynucleotide
tagtagtagactccgcaaga

SEQ ID NO: 4882 - DNA, 19 bp, Artificial Sequence
  Synthetic Polynucleotide
tgtcaaatagattacgctg

SEQ ID NO: 4883 - DNA, 18 bp, Artificial Sequence
  Synthetic Polynucleotide
gaaggaacagagactgct

SEQ ID NO: 4884 - DNA, 19 bp, Artificial Sequence
  Synthetic Polynucleotide
caaatctggcaactacaag

SEQ ID NO: 4885 - DNA, 20 bp, Artificial Sequence
  Synthetic Polynucleotide
gttccatgaattgcacctgt

SEQ ID NO: 4886 - DNA, 19 bp, Artificial Sequence
  Synthetic Polynucleotide
tttgactccttagtttcca

SEQ ID NO: 4887 - DNA, 20 bp, Artificial Sequence
  Synthetic Polynucleotide
acaatcattgtttacctgac

SEQ ID NO: 4888 - DNA, 17 bp, Artificial Sequence
  Synthetic Polynucleotide
ggttgactgggctttga

SEQ ID NO: 4889 - DNA, 20 bp, Artificial Sequence
  Synthetic Polynucleotide
cgctcgaattttcttcctca

SEQ ID NO: 4890 - DNA, 19 bp, Artificial Sequence
  Synthetic Polynucleotide
tcactggcaagtactcctg

SEQ ID NO: 4891 - DNA, 18 bp, Artificial Sequence
  Synthetic Polynucleotide
gagggtgatagctcttgt

SEQ ID NO: 4892 - DNA, 19 bp, Artificial Sequence
  Synthetic Polynucleotide
tgtttaaagatgatcccgc

SEQ ID NO: 4893 - DNA, 17 bp, Artificial Sequence
  Synthetic Polynucleotide
tgtggatacctctcagg

SEQ ID NO: 4894 - DNA, 18 bp, Artificial Sequence
  Synthetic Polynucleotide
tgattttgtgaaccagca

SEQ ID NO: 4895 - DNA, 18 bp, Artificial Sequence
  Synthetic Polynucleotide
gcaagctcacttgaatgg

SEQ ID NO: 4896 - DNA, 20 bp, Artificial Sequence
  Synthetic Polynucleotide
cttttctccaccatactaac

SEQ ID NO: 4897 - DNA, 19 bp, Artificial Sequence
  Synthetic Polynucleotide
tgaaaccgaagatgcaaca

SEQ ID NO: 4898 - DNA, 20 bp, Artificial Sequence
  Synthetic Polynucleotide
attccaaggcaatcctatta

SEQ ID NO: 4899 - DNA, 19 bp, Artificial Sequence
  Synthetic Polynucleotide
gttccatgaacattttggc

SEQ ID NO: 4900 - DNA, 18 bp, Artificial Sequence
  Synthetic Polynucleotide
ctttccccatttcagagg

SEQ ID NO: 4901 - DNA, 17 bp, Artificial Sequence
  Synthetic Polynucleotide
aggttagcatgaggctt

SEQ ID NO: 4902 - DNA, 18 bp, Artificial Sequence
  Synthetic Polynucleotide
cagatgactggactttta

SEQ ID NO: 4903 - DNA, 19 bp, Artificial Sequence
  Synthetic Polynucleotide
ctttgaatacatctcctgc

SEQ ID NO: 4904 - DNA, 17 bp, Artificial Sequence
  Synthetic Polynucleotide
gcatccatccaatgacc

SEQ ID NO: 4905 - DNA, 17 bp, Artificial Sequence
  Synthetic Polynucleotide
tcagacacattgtcagc

SEQ ID NO: 4906 - DNA, 20 bp, Artificial Sequence
  Synthetic Polynucleotide
atggttatcctttactcctg

SEQ ID NO: 4907 - DNA, 20 bp, Artificial Sequence
  Synthetic Polynucleotide
gcaactataactttaagggc

SEQ ID NO: 4908 - DNA, 20 bp, Artificial Sequence
  Synthetic Polynucleotide
ttttactgtcccatgttggt

SEQ ID NO: 4909 - DNA, 18 bp, Artificial Sequence
  Synthetic Polynucleotide
tccatttacaacttctgc

SEQ ID NO: 4910 - DNA, 18 bp, Artificial Sequence
  Synthetic Polynucleotide
tactccttgaaaagcaat

SEQ ID NO: 4911 - DNA, 18 bp, Artificial Sequence
  Synthetic Polynucleotide
ggaccccgatgatgttaa

SEQ ID NO: 4912 - DNA, 17 bp, Artificial Sequence
  Synthetic Polynucleotide
gtgtgtttgcgtgtgaa

SEQ ID NO: 4913 - DNA, 19 bp, Artificial Sequence
  Synthetic Polynucleotide
tggttaaacttgtccctaa

SEQ ID NO: 4914 - DNA, 17 bp, Artificial Sequence
  Synthetic Polynucleotide
cctacaccagaacccca

SEQ ID NO: 4915 - DNA, 20 bp, Artificial Sequence
  Synthetic Polynucleotide
accagtatgtgagtatcaag

SEQ ID NO: 4916 - DNA, 20 bp, Artificial Sequence
  Synthetic Polynucleotide
tgagatgttgcccatactta

SEQ ID NO: 4917 - DNA, 20 bp, Artificial Sequence
  Synthetic Polynucleotide
agtagtgtactccactatta

SEQ ID NO: 4918 - DNA, 20 bp, Artificial Sequence
  Synthetic Polynucleotide
atgatatccttggcatttta

SEQ ID NO: 4919 - DNA, 20 bp, Artificial Sequence
  Synthetic Polynucleotide
atctgctacagttgtatcta

SEQ ID NO: 4920 - DNA, 19 bp, Artificial Sequence
  Synthetic Polynucleotide
acatccatgttttgcacct

SEQ ID NO: 4921 - DNA, 20 bp, Artificial Sequence
  Synthetic Polynucleotide
cagaaataccagcattagca

SEQ ID NO: 4922 - DNA, 19 bp, Artificial Sequence
  Synthetic Polynucleotide
aaccaatcagttccatcat

SEQ ID NO: 4923 - DNA, 19 bp, Artificial Sequence
  Synthetic Polynucleotide
gtcatgagtattgacttga

SEQ ID NO: 4924 - DNA, 18 bp, Artificial Sequence
  Synthetic Polynucleotide
tgctccaccaattcttaa

SEQ ID NO: 4925 - DNA, 19 bp, Artificial Sequence
  Synthetic Polynucleotide
cagtccattccactgcctg

SEQ ID NO: 4926 - DNA, 18 bp, Artificial Sequence
  Synthetic Polynucleotide
gcatgtttggatctacca

SEQ ID NO: 4927 - DNA, 20 bp, Artificial Sequence
  Synthetic Polynucleotide
gtgcatcagaaatattacct

SEQ ID NO: 4928 - DNA, 17 bp, Artificial Sequence
  Synthetic Polynucleotide
accacccacccattttg

SEQ ID NO: 4929 - DNA, 17 bp, Artificial Sequence
  Synthetic Polynucleotide
atcttaccttgcaccgg

SEQ ID NO: 4930 - DNA, 19 bp, Artificial Sequence
  Synthetic Polynucleotide
ggcctcgatgtcttacgta

SEQ ID NO: 4931 - DNA, 17 bp, Artificial Sequence
  Synthetic Polynucleotide
tcaacgatgtaccacaa

SEQ ID NO: 4932 - DNA, 18 bp, Artificial Sequence
  Synthetic Polynucleotide
gaaacatttcagctccag

SEQ ID NO: 4933 - DNA, 17 bp, Artificial Sequence
  Synthetic Polynucleotide
tttcttcctcaaccaga

SEQ ID NO: 4934 - DNA, 18 bp, Artificial Sequence
  Synthetic Polynucleotide
tctgtaccttctattgca

SEQ ID NO: 4935 - DNA, 20 bp, Artificial Sequence
  Synthetic Polynucleotide
tacaaattagatgagttgcc

SEQ ID NO: 4936 - DNA, 18 bp, Artificial Sequence
  Synthetic Polynucleotide
ccatccagatttcacagt

SEQ ID NO: 4937 - DNA, 20 bp, Artificial Sequence
  Synthetic Polynucleotide
aaactaactcctatgtctgt

SEQ ID NO: 4938 - DNA, 20 bp, Artificial Sequence
  Synthetic Polynucleotide
agtgtgctccacctaatact

SEQ ID NO: 4939 - DNA, 19 bp, Artificial Sequence
  Synthetic Polynucleotide
ctttctttcctggctctga

SEQ ID NO: 4940 - DNA, 17 bp, Artificial Sequence
  Synthetic Polynucleotide
ttgtagcccagccatga

SEQ ID NO: 4941 - DNA, 20 bp, Artificial Sequence
  Synthetic Polynucleotide
atccaagaggtgaagatcat

SEQ ID NO: 4942 - DNA, 18 bp, Artificial Sequence
  Synthetic Polynucleotide
acccagccaaagcaaaat

SEQ ID NO: 4943 - DNA, 20 bp, Artificial Sequence
  Synthetic Polynucleotide
gtctatgaaaggacatactg

SEQ ID NO: 4944 - DNA, 17 bp, Artificial Sequence
  Synthetic Polynucleotide
tcccttctgtcagtatc

SEQ ID NO: 4945 - DNA, 17 bp, Artificial Sequence
  Synthetic Polynucleotide
gaggcagaacagcttgt

SEQ ID NO: 4946 - DNA, 19 bp, Artificial Sequence
  Synthetic Polynucleotide
gttgttgttagtaagcaga

SEQ ID NO: 4947 - DNA, 19 bp, Artificial Sequence
  Synthetic Polynucleotide
gcaggttgtagcatgattg

SEQ ID NO: 4948 - DNA, 18 bp, Artificial Sequence
  Synthetic Polynucleotide
agatgcagagaacgaaga

SEQ ID NO: 4949 - DNA, 19 bp, Artificial Sequence
  Synthetic Polynucleotide
tctgaccatcagcttagag

SEQ ID NO: 4950 - DNA, 17 bp, Artificial Sequence
  Synthetic Polynucleotide
tcattctgtccgatgtt

SEQ ID NO: 4951 - DNA, 20 bp, Artificial Sequence
  Synthetic Polynucleotide
gaatcgtacatttgtagtgc

SEQ ID NO: 4952 - DNA, 19 bp, Artificial Sequence
  Synthetic Polynucleotide
cttcccacaaactcctagg

SEQ ID NO: 4953 - DNA, 17 bp, Artificial Sequence
  Synthetic Polynucleotide
agggacatctttgagga

SEQ ID NO: 4954 - DNA, 18 bp, Artificial Sequence
  Synthetic Polynucleotide
tcagtctgaatcccagtt

SEQ ID NO: 4955 - DNA, 20 bp, Artificial Sequence
  Synthetic Polynucleotide
caaggatcacattagccaga

SEQ ID NO: 4956 - DNA, 19 bp, Artificial Sequence
  Synthetic Polynucleotide
gacatctgagaagtgtttc

SEQ ID NO: 4957 - DNA, 20 bp, Artificial Sequence
  Synthetic Polynucleotide
aattatgaccacatacgaat

SEQ ID NO: 4958 - DNA, 18 bp, Artificial Sequence
  Synthetic Polynucleotide
agacacaatatgagccac

SEQ ID NO: 4959 - DNA, 19 bp, Artificial Sequence
  Synthetic Polynucleotide
cttttagcagtcactcaac

SEQ ID NO: 4960 - DNA, 17 bp, Artificial Sequence
  Synthetic Polynucleotide
accatgtctaacgtcag

SEQ ID NO: 4961 - DNA, 20 bp, Artificial Sequence
  Synthetic Polynucleotide
acatgaatcaaacagagcag

SEQ ID NO: 4962 - DNA, 18 bp, Artificial Sequence
  Synthetic Polynucleotide
aagtcttccagagaccat

SEQ ID NO: 4963 - DNA, 19 bp, Artificial Sequence
  Synthetic Polynucleotide
tatcaacgcacaatgaagt

SEQ ID NO: 4964 - DNA, 19 bp, Artificial Sequence
  Synthetic Polynucleotide
atgaagtctagataccacc

SEQ ID NO: 4965 - DNA, 19 bp, Artificial Sequence
  Synthetic Polynucleotide
ttctgtagggtgaatttct

SEQ ID NO: 4966 - DNA, 20 bp, Artificial Sequence
  Synthetic Polynucleotide
tgttccacattctgtaaggc

SEQ ID NO: 4967 - DNA, 20 bp, Artificial Sequence
  Synthetic Polynucleotide
gtgaaccacatatcacagct

SEQ ID NO: 4968 - DNA, 19 bp, Artificial Sequence
  Synthetic Polynucleotide
cccatatcgtctattgtca

SEQ ID NO: 4969 - DNA, 18 bp, Artificial Sequence
  Synthetic Polynucleotide
atgcaaaagccagcgacc

SEQ ID NO: 4970 - DNA, 20 bp, Artificial Sequence
  Synthetic Polynucleotide
taacaatttcaggcccagta

SEQ ID NO: 4971 - DNA, 20 bp, Artificial Sequence
  Synthetic Polynucleotide
ggcacttctggatatgtctt

SEQ ID NO: 4972 - DNA, 18 bp, Artificial Sequence
  Synthetic Polynucleotide
tgcgatatgttgaatccc

SEQ ID NO: 4973 - DNA, 18 bp, Artificial Sequence
  Synthetic Polynucleotide
taatcccaaaggcgtcag

SEQ ID NO: 4974 - DNA, 20 bp, Artificial Sequence
  Synthetic Polynucleotide
cactgtattttgacctctta

SEQ ID NO: 4975 - DNA, 20 bp, Artificial Sequence
  Synthetic Polynucleotide
acttgaaggtggtggtctaa

SEQ ID NO: 4976 - DNA, 19 bp, Artificial Sequence
  Synthetic Polynucleotide
tcgttgtcgattgatccac

SEQ ID NO: 4977 - DNA, 18 bp, Artificial Sequence
  Synthetic Polynucleotide
tggatgtgattgacaaga

SEQ ID NO: 4978 - DNA, 17 bp, Artificial Sequence
  Synthetic Polynucleotide
ggggaaagctaacgggg

SEQ ID NO: 4979 - DNA, 20 bp, Artificial Sequence
  Synthetic Polynucleotide
ttcgaatacattttgaccct

SEQ ID NO: 4980 - DNA, 18 bp, Artificial Sequence
  Synthetic Polynucleotide
tcagagctagaatgctcg

SEQ ID NO: 4981 - DNA, 18 bp, Artificial Sequence
  Synthetic Polynucleotide
ttgcaatcctacctgtgt

SEQ ID NO: 4982 - DNA, 17 bp, Artificial Sequence
  Synthetic Polynucleotide
tttcctgtcagtggagc

SEQ ID NO: 4983 - DNA, 20 bp, Artificial Sequence
  Synthetic Polynucleotide
catcaactattcttgagcct

SEQ ID NO: 4984 - DNA, 20 bp, Artificial Sequence
  Synthetic Polynucleotide
tggagtggtttgatgtgtta

SEQ ID NO: 4985 - DNA, 20 bp, Artificial Sequence
  Synthetic Polynucleotide
gcacgtcagttcgtaagtat

SEQ ID NO: 4986 - DNA, 20 bp, Artificial Sequence
  Synthetic Polynucleotide
cattgaacccattgtcttct

SEQ ID NO: 4987 - DNA, 19 bp, Artificial Sequence
  Synthetic Polynucleotide
atggaggggtttcttatca

SEQ ID NO: 4988 - DNA, 18 bp, Artificial Sequence
  Synthetic Polynucleotide
atggtgtgatctgaacaa

SEQ ID NO: 4989 - DNA, 17 bp, Artificial Sequence
  Synthetic Polynucleotide
ggtcacggagtgtaaaa

SEQ ID NO: 4990 - DNA, 19 bp, Artificial Sequence
  Synthetic Polynucleotide
gtctcccatgttgcagtag

SEQ ID NO: 4991 - DNA, 19 bp, Artificial Sequence
  Synthetic Polynucleotide
ggtagtaacgtaccaagtc

SEQ ID NO: 4992 - DNA, 20 bp, Artificial Sequence
  Synthetic Polynucleotide
ctttgtttgtgagtagccac

SEQ ID NO: 4993 - DNA, 19 bp, Artificial Sequence
  Synthetic Polynucleotide
aacatctgatagaatgcga

SEQ ID NO: 4994 - DNA, 18 bp, Artificial Sequence
  Synthetic Polynucleotide
tcttcttcttcagccagt

SEQ ID NO: 4995 - DNA, 20 bp, Artificial Sequence
  Synthetic Polynucleotide
tgttttagttgcacttctgg

SEQ ID NO: 4996 - DNA, 19 bp, Artificial Sequence
  Synthetic Polynucleotide
cctcttgctagatttgctg

SEQ ID NO: 4997 - DNA, 20 bp, Artificial Sequence
  Synthetic Polynucleotide
ctgctaactctttagaatgg

SEQ ID NO: 4998 - DNA, 19 bp, Artificial Sequence
  Synthetic Polynucleotide
gcctcagttctttgatatt

SEQ ID NO: 4999 - DNA, 19 bp, Artificial Sequence
  Synthetic Polynucleotide
tatgcttatggcagtgtac

SEQ ID NO: 5000 - DNA, 17 bp, Artificial Sequence
  Synthetic Polynucleotide
atgggttttgcacactg

SEQ ID NO: 5001 - DNA, 17 bp, Artificial Sequence
  Synthetic Polynucleotide
gacatgatcagacgcag

SEQ ID NO: 5002 - DNA, 18 bp, Artificial Sequence
  Synthetic Polynucleotide
gtagttctcctctgaaga

SEQ ID NO: 5003 - DNA, 19 bp, Artificial Sequence
  Synthetic Polynucleotide
acacagaagcatacatttg

SEQ ID NO: 5004 - DNA, 19 bp, Artificial Sequence
  Synthetic Polynucleotide
cccttatgtctttctcttg

SEQ ID NO: 5005 - DNA, 19 bp, Artificial Sequence
  Synthetic Polynucleotide
caccattttaggccgctaa

SEQ ID NO: 5006 - DNA, 20 bp, Artificial Sequence
  Synthetic Polynucleotide
tcaaacctcacttagaaaat

SEQ ID NO: 5007 - DNA, 17 bp, Artificial Sequence
  Synthetic Polynucleotide
agctttaccagatgcag

SEQ ID NO: 5008 - DNA, 18 bp, Artificial Sequence
  Synthetic Polynucleotide
tacaagcacatttatccg

SEQ ID NO: 5009 - DNA, 18 bp, Artificial Sequence
  Synthetic Polynucleotide
gtgaactcctgttttgtc

SEQ ID NO: 5010 - DNA, 20 bp, Artificial Sequence
  Synthetic Polynucleotide
ttatctagtcttcccggttt

SEQ ID NO: 5011 - DNA, 18 bp, Artificial Sequence
  Synthetic Polynucleotide
catctgttgattccagta

SEQ ID NO: 5012 - DNA, 18 bp, Artificial Sequence
  Synthetic Polynucleotide
gctcatgcaattttgact

SEQ ID NO: 5013 - DNA, 19 bp, Artificial Sequence
  Synthetic Polynucleotide
acttgaactcgactatcca

SEQ ID NO: 5014 - DNA, 18 bp, Artificial Sequence
  Synthetic Polynucleotide
agagattcccgtgtatta

SEQ ID NO: 5015 - DNA, 20 bp, Artificial Sequence
  Synthetic Polynucleotide
aagacctcccgtattgctaa

SEQ ID NO: 5016 - DNA, 18 bp, Artificial Sequence
  Synthetic Polynucleotide
tctgctttcacaatgaag

SEQ ID NO: 5017 - DNA, 19 bp, Artificial Sequence
  Synthetic Polynucleotide
cccttgaagttcttcctaa

SEQ ID NO: 5018 - DNA, 17 bp, Artificial Sequence
  Synthetic Polynucleotide
ccctgtaggttcatcaa

SEQ ID NO: 5019 - DNA, 18 bp, Artificial Sequence
  Synthetic Polynucleotide
tcctgacgacctgaataa

SEQ ID NO: 5020 - DNA, 18 bp, Artificial Sequence
  Synthetic Polynucleotide
tttgtccttaggttgaga

SEQ ID NO: 5021 - DNA, 18 bp, Artificial Sequence
  Synthetic Polynucleotide
ttcccaactgtttcacag

SEQ ID NO: 5022 - DNA, 17 bp, Artificial Sequence
  Synthetic Polynucleotide
tcactatccagaacgag

SEQ ID NO: 5023 - DNA, 18 bp, Artificial Sequence
  Synthetic Polynucleotide
gctcgattcttctccaga

SEQ ID NO: 5024 - DNA, 18 bp, Artificial Sequence
  Synthetic Polynucleotide
gtcagccaattttgttta

SEQ ID NO: 5025 - DNA, 20 bp, Artificial Sequence
  Synthetic Polynucleotide
aacacacacactcgacatat

SEQ ID NO: 5026 - DNA, 18 bp, Artificial Sequence
  Synthetic Polynucleotide
ggtaatgactccctttgc

SEQ ID NO: 5027 - DNA, 17 bp, Artificial Sequence
  Synthetic Polynucleotide
agcagtttccagccatg

SEQ ID NO: 5028 - DNA, 20 bp, Artificial Sequence
  Synthetic Polynucleotide
tcttttcatctattccaagc

SEQ ID NO: 5029 - DNA, 20 bp, Artificial Sequence
  Synthetic Polynucleotide
ctcagcactcagtaagatat

SEQ ID NO: 5030 - DNA, 17 bp, Artificial Sequence
  Synthetic Polynucleotide
gggaagaaccacttcat

SEQ ID NO: 5031 - DNA, 17 bp, Artificial Sequence
  Synthetic Polynucleotide
tgaatgaagatggcgtc

SEQ ID NO: 5032 - DNA, 17 bp, Artificial Sequence
  Synthetic Polynucleotide
attcccatgtaggaggc

SEQ ID NO: 5033 - DNA, 18 bp, Artificial Sequence
  Synthetic Polynucleotide
gcgctaacgtgcttaaat

SEQ ID NO: 5034 - DNA, 17 bp, Artificial Sequence
  Synthetic Polynucleotide
gagtcccactttgagta

SEQ ID NO: 5035 - DNA, 17 bp, Artificial Sequence
  Synthetic Polynucleotide
caccttgtcaaccttgc

SEQ ID NO: 5036 - DNA, 18 bp, Artificial Sequence
  Synthetic Polynucleotide
ctttccccttgatgtagt

SEQ ID NO: 5037 - DNA, 17 bp, Artificial Sequence
  Synthetic Polynucleotide
gtcccaaaatggtgctt

SEQ ID NO: 5038 - DNA, 17 bp, Artificial Sequence
  Synthetic Polynucleotide
gggtaattgctggtgca

SEQ ID NO: 5039 - DNA, 17 bp, Artificial Sequence
  Synthetic Polynucleotide
caccgattcgctcaccg

SEQ ID NO: 5040 - DNA, 17 bp, Artificial Sequence
  Synthetic Polynucleotide
gttgaattgctgcccca

SEQ ID NO: 5041 - DNA, 17 bp, Artificial Sequence
  Synthetic Polynucleotide
tcttcttgatgtgcgtc

SEQ ID NO: 5042 - DNA, 17 bp, Artificial Sequence
  Synthetic Polynucleotide
cgcattcccatgtaggt

SEQ ID NO: 5043 - DNA, 18 bp, Artificial Sequence
  Synthetic Polynucleotide
gcttgttgctgaacccca

SEQ ID NO: 5044 - DNA, 17 bp, Artificial Sequence
  Synthetic Polynucleotide
ccatagtcgtcccacag

SEQ ID NO: 5045 - DNA, 17 bp, Artificial Sequence
  Synthetic Polynucleotide
cccacctgatgtttcca

SEQ ID NO: 5046 - DNA, 18 bp, Artificial Sequence
  Synthetic Polynucleotide
ggagtccaaaacaccttt

SEQ ID NO: 5047 - DNA, 17 bp, Artificial Sequence
  Synthetic Polynucleotide
gtgcctgccaacggata

SEQ ID NO: 5048 - DNA, 17 bp, Artificial Sequence
  Synthetic Polynucleotide
atgtagccctcgtagaa

SEQ ID NO: 5049 - DNA, 19 bp, Artificial Sequence
  Synthetic Polynucleotide
aaaagctagtgatccagat

SEQ ID NO: 5050 - DNA, 20 bp, Artificial Sequence
  Synthetic Polynucleotide
ttcctgtaaaacttttcccc

SEQ ID NO: 5051 - DNA, 19 bp, Artificial Sequence
  Synthetic Polynucleotide
ggtcatatgctgatgcttg

SEQ ID NO: 5052 - DNA, 20 bp, Artificial Sequence
  Synthetic Polynucleotide
gtaaaattgattcacccaag

SEQ ID NO: 5053 - DNA, 18 bp, Artificial Sequence
  Synthetic Polynucleotide
ttgactttcctgagaagg

SEQ ID NO: 5054 - DNA, 20 bp, Artificial Sequence
  Synthetic Polynucleotide
tcatttctaaccccaccttt

SEQ ID NO: 5055 - DNA, 19 bp, Artificial Sequence
  Synthetic Polynucleotide
tgactgctcccacctaaaa

SEQ ID NO: 5056 - DNA, 20 bp, Artificial Sequence
  Synthetic Polynucleotide
cactcatcatactcatcatc

SEQ ID NO: 5057 - DNA, 17 bp, Artificial Sequence
  Synthetic Polynucleotide
atccttgagtcctgcta

SEQ ID NO: 5058 - DNA, 18 bp, Artificial Sequence
  Synthetic Polynucleotide
gagtccatacgatgtcag

SEQ ID NO: 5059 - DNA, 19 bp, Artificial Sequence
  Synthetic Polynucleotide
tgggattccacacaaaatc

SEQ ID NO: 5060 - DNA, 17 bp, Artificial Sequence
  Synthetic Polynucleotide
cgtgatccaaaggttgc

SEQ ID NO: 5061 - DNA, 18 bp, Artificial Sequence
  Synthetic Polynucleotide
tactccaccgattcgctc

SEQ ID NO: 5062 - DNA, 19 bp, Artificial Sequence
  Synthetic Polynucleotide
ctgatcttcttgtactcct

SEQ ID NO: 5063 - DNA, 17 bp, Artificial Sequence
  Synthetic Polynucleotide
cagttcgtctctgatgc

SEQ ID NO: 5064 - DNA, 17 bp, Artificial Sequence
  Synthetic Polynucleotide
cgcgtaaccagggaaag

SEQ ID NO: 5065 - DNA, 17 bp, Artificial Sequence
  Synthetic Polynucleotide
aatagtgccgtgagtgc

SEQ ID NO: 5066 - DNA, 18 bp, Artificial Sequence
  Synthetic Polynucleotide
tcacaaattagttctgcc

SEQ ID NO: 5067 - DNA, 19 bp, Artificial Sequence
  Synthetic Polynucleotide
tgatggatgctggattcag

SEQ ID NO: 5068 - DNA, 20 bp, Artificial Sequence
  Synthetic Polynucleotide
aatatcaccttctgtttgcg

SEQ ID NO: 5069 - DNA, 18 bp, Artificial Sequence
  Synthetic Polynucleotide
tatcaggttcaggctagt

SEQ ID NO: 5070 - DNA, 17 bp, Artificial Sequence
  Synthetic Polynucleotide
gtacataccgttgccga

SEQ ID NO: 5071 - DNA, 17 bp, Artificial Sequence
  Synthetic Polynucleotide
ggatggttccacacttt

SEQ ID NO: 5072 - DNA, 19 bp, Artificial Sequence
  Synthetic Polynucleotide
gtcctgctataaaagctcc

SEQ ID NO: 5073 - DNA, 17 bp, Artificial Sequence
  Synthetic Polynucleotide
cagggttttgaccaggc

SEQ ID NO: 5074 - DNA, 18 bp, Artificial Sequence
  Synthetic Polynucleotide
ctcactgacctgagccat

SEQ ID NO: 5075 - DNA, 18 bp, Artificial Sequence
  Synthetic Polynucleotide
tgcatcaggaaactttgg

SEQ ID NO: 5076 - DNA, 17 bp, Artificial Sequence
  Synthetic Polynucleotide
gttgtaccaccaaccat

SEQ ID NO: 5077 - DNA, 17 bp, Artificial Sequence
  Synthetic Polynucleotide
gctgcatacagagacct

SEQ ID NO: 5078 - DNA, 17 bp, Artificial Sequence
  Synthetic Polynucleotide
agccatcaacggatttg

SEQ ID NO: 5079 - DNA, 20 bp, Artificial Sequence
  Synthetic Polynucleotide
aagaaagcacaactcttcaa

SEQ ID NO: 5080 - DNA, 18 bp, Artificial Sequence
  Synthetic Polynucleotide
gcataagcacagatcttt

SEQ ID NO: 5081 - DNA, 19 bp, Artificial Sequence
  Synthetic Polynucleotide
cctgccatatttcaacgaa

SEQ ID NO: 5082 - DNA, 19 bp, Artificial Sequence
  Synthetic Polynucleotide
gctcttcacagaacttctt

SEQ ID NO: 5083 - DNA, 18 bp, Artificial Sequence
  Synthetic Polynucleotide
caccatcagtcccagaag

SEQ ID NO: 5084 - DNA, 20 bp, Artificial Sequence
  Synthetic Polynucleotide
ctgatcccatccaatcatcg

SEQ ID NO: 5085 - DNA, 20 bp, Artificial Sequence
  Synthetic Polynucleotide
ttcatctgatttcccttacc

SEQ ID NO: 5086 - DNA, 20 bp, Artificial Sequence
  Synthetic Polynucleotide
tactcctgtcaagataatcc

SEQ ID NO: 5087 - DNA, 20 bp, Artificial Sequence
  Synthetic Polynucleotide
acaagggcactatatcccgt

SEQ ID NO: 5088 - DNA, 20 bp, Artificial Sequence
  Synthetic Polynucleotide
gacagaatcacaagtaagcc

SEQ ID NO: 5089 - DNA, 20 bp, Artificial Sequence
  Synthetic Polynucleotide
ttcattatgcctcaacaaat

SEQ ID NO: 5090 - DNA, 19 bp, Artificial Sequence
  Synthetic Polynucleotide
tggattttcgccatatata

SEQ ID NO: 5091 - DNA, 20 bp, Artificial Sequence
  Synthetic Polynucleotide
cttcatggaaaccacataaa

SEQ ID NO: 5092 - DNA, 20 bp, Artificial Sequence
  Synthetic Polynucleotide
cagaactttgtatccaagat

SEQ ID NO: 5093 - DNA, 17 bp, Artificial Sequence
  Synthetic Polynucleotide
cgaaaacgctaaccaag

SEQ ID NO: 5094 - DNA, 19 bp, Artificial Sequence
  Synthetic Polynucleotide
gtacctccgcatcaatagt

SEQ ID NO: 5095 - DNA, 19 bp, Artificial Sequence
  Synthetic Polynucleotide
gaccaatactccctcccag

SEQ ID NO: 5096 - DNA, 20 bp, Artificial Sequence
  Synthetic Polynucleotide
gtaatcacctgttttaccgc

SEQ ID NO: 5097 - DNA, 18 bp, Artificial Sequence
  Synthetic Polynucleotide
attcacatgtccacaagg

SEQ ID NO: 5098 - DNA, 20 bp, Artificial Sequence
  Synthetic Polynucleotide
aacttctcctgtcattagtc

SEQ ID NO: 5099 - DNA, 17 bp, Artificial Sequence
  Synthetic Polynucleotide
tccagcaactaccaagt

SEQ ID NO: 5100 - DNA, 17 bp, Artificial Sequence
  Synthetic Polynucleotide
tcttcgccagatacttc

SEQ ID NO: 5101 - DNA, 19 bp, Artificial Sequence
  Synthetic Polynucleotide
tcatcaaaggactactccc

SEQ ID NO: 5102 - DNA, 20 bp, Artificial Sequence
  Synthetic Polynucleotide
atgctaaagaaaagcatcga

SEQ ID NO: 5103 - DNA, 18 bp, Artificial Sequence
  Synthetic Polynucleotide
acctctatcaacacactg

SEQ ID NO: 5104 - DNA, 19 bp, Artificial Sequence
  Synthetic Polynucleotide
tcgattccactttcctgtt

SEQ ID NO: 5105 - DNA, 20 bp, Artificial Sequence
  Synthetic Polynucleotide
gctttgtagacacgggagca

SEQ ID NO: 5106 - DNA, 19 bp, Artificial Sequence
  Synthetic Polynucleotide
gcatcagggagactgtttg

SEQ ID NO: 5107 - DNA, 20 bp, Artificial Sequence
  Synthetic Polynucleotide
atcaaggctattgttgagaa

SEQ ID NO: 5108 - DNA, 20 bp, Artificial Sequence
  Synthetic Polynucleotide
atcattctttggaaatgacg

SEQ ID NO: 5109 - DNA, 19 bp, Artificial Sequence
  Synthetic Polynucleotide
ctccaagaccttaacaaga

SEQ ID NO: 5110 - DNA, 17 bp, Artificial Sequence
  Synthetic Polynucleotide
aagtttgttgcctgcta

SEQ ID NO: 5111 - DNA, 19 bp, Artificial Sequence
  Synthetic Polynucleotide
ggccaagaagggcattatg

SEQ ID NO: 5112 - DNA, 17 bp, Artificial Sequence
  Synthetic Polynucleotide
aactcagggttggttga

SEQ ID NO: 5113 - DNA, 20 bp, Artificial Sequence
  Synthetic Polynucleotide
gaaatctgtgccagaaaagc

SEQ ID NO: 5114 - DNA, 20 bp, Artificial Sequence
  Synthetic Polynucleotide
tgctgaaatagttgagaaaa

SEQ ID NO: 5115 - DNA, 18 bp, Artificial Sequence
  Synthetic Polynucleotide
aactaactacttgacgca

SEQ ID NO: 5116 - DNA, 18 bp, Artificial Sequence
  Synthetic Polynucleotide
ggaattgggctgtaagta

SEQ ID NO: 5117 - DNA, 19 bp, Artificial Sequence
  Synthetic Polynucleotide
tctgtaatggatgaaaagg

SEQ ID NO: 5118 - DNA, 20 bp, Artificial Sequence
  Synthetic Polynucleotide
tagattagagggtttctttt

SEQ ID NO: 5119 - DNA, 20 bp, Artificial Sequence
  Synthetic Polynucleotide
cattcatggatgttctagat

SEQ ID NO: 5120 - DNA, 19 bp, Artificial Sequence
  Synthetic Polynucleotide
tattctttcaaacgggttt

SEQ ID NO: 5121 - DNA, 19 bp, Artificial Sequence
  Synthetic Polynucleotide
aagtcagagctaagcgaaa

SEQ ID NO: 5122 - DNA, 19 bp, Artificial Sequence
  Synthetic Polynucleotide
ccaccaaagcacgacacag

SEQ ID NO: 5123 - DNA, 17 bp, Artificial Sequence
  Synthetic Polynucleotide
ctcagggtcacgaaacg

SEQ ID NO: 5124 - DNA, 17 bp, Artificial Sequence
  Synthetic Polynucleotide
caatagcatacgtcacg

SEQ ID NO: 5125 - DNA, 20 bp, Artificial Sequence
  Synthetic Polynucleotide
aacaacaaacaacaacaaca

SEQ ID NO: 5126 - DNA, 19 bp, Artificial Sequence
  Synthetic Polynucleotide
aatctgttccgccgttacg

SEQ ID NO: 5127 - DNA, 17 bp, Artificial Sequence
  Synthetic Polynucleotide
gatggtagacagaggct

SEQ ID NO: 5128 - DNA, 19 bp, Artificial Sequence
  Synthetic Polynucleotide
ggttctactatccacacca

SEQ ID NO: 5129 - DNA, 20 bp, Artificial Sequence
  Synthetic Polynucleotide
ggtggctataacacattggg

SEQ ID NO: 5130 - DNA, 17 bp, Artificial Sequence
  Synthetic Polynucleotide
gtccatgctctccgcta

SEQ ID NO: 5131 - DNA, 19 bp, Artificial Sequence
  Synthetic Polynucleotide
acaagacaataagaccaca

SEQ ID NO: 5132 - DNA, 19 bp, Artificial Sequence
  Synthetic Polynucleotide
tatgcgatctcacactctc

SEQ ID NO: 5133 - DNA, 19 bp, Artificial Sequence
  Synthetic Polynucleotide
cggacaacccgtatcatga

SEQ ID NO: 5134 - DNA, 19 bp, Artificial Sequence
  Synthetic Polynucleotide
aaaacacagtactaacacg

SEQ ID NO: 5135 - DNA, 19 bp, Artificial Sequence
  Synthetic Polynucleotide
aaactttctcaggagacct

SEQ ID NO: 5136 - DNA, 20 bp, Artificial Sequence
  Synthetic Polynucleotide
tccccgccatattttatgaa

SEQ ID NO: 5137 - DNA, 19 bp, Artificial Sequence
  Synthetic Polynucleotide
agcattaacgaactcaggc

SEQ ID NO: 5138 - DNA, 18 bp, Artificial Sequence
  Synthetic Polynucleotide
tctcagtagatcatccca

SEQ ID NO: 5139 - DNA, 17 bp, Artificial Sequence
  Synthetic Polynucleotide
ttttgaaagtgagcggg

SEQ ID NO: 5140 - DNA, 18 bp, Artificial Sequence
  Synthetic Polynucleotide
agtggcaaggagctgaaa

SEQ ID NO: 5141 - DNA, 18 bp, Artificial Sequence
  Synthetic Polynucleotide
ctcgaagaagcgatcctg

SEQ ID NO: 5142 - DNA, 17 bp, Artificial Sequence
  Synthetic Polynucleotide
actcgaaggtatgtcga

SEQ ID NO: 5143 - DNA, 18 bp, Artificial Sequence
  Synthetic Polynucleotide
taaccctacctttgaaga

SEQ ID NO: 5144 - DNA, 17 bp, Artificial Sequence
  Synthetic Polynucleotide
ggatcccactacaagga

SEQ ID NO: 5145 - DNA, 17 bp, Artificial Sequence
  Synthetic Polynucleotide
ctgggcattgtggcgag

SEQ ID NO: 5146 - DNA, 17 bp, Artificial Sequence
  Synthetic Polynucleotide
cgctgtaccaggcatcg

SEQ ID NO: 5147 - DNA, 19 bp, Artificial Sequence
  Synthetic Polynucleotide
ttcaaaacggaagtcatcg

SEQ ID NO: 5148 - DNA, 17 bp, Artificial Sequence
  Synthetic Polynucleotide
gcagttgaggagtacca

SEQ ID NO: 5149 - DNA, 20 bp, Artificial Sequence
  Synthetic Polynucleotide
gcagaagcgtgattggaaga

SEQ ID NO: 5150 - DNA, 19 bp, Artificial Sequence
  Synthetic Polynucleotide
atctgtggactgaacatga

SEQ ID NO: 5151 - DNA, 20 bp, Artificial Sequence
  Synthetic Polynucleotide
ttatggtgaacactcgaaag

SEQ ID NO: 5152 - DNA, 18 bp, Artificial Sequence
  Synthetic Polynucleotide
acataagtcgtcgggtac

SEQ ID NO: 5153 - DNA, 20 bp, Artificial Sequence
  Synthetic Polynucleotide
gagtctgcgaaagaatgcga

SEQ ID NO: 5154 - DNA, 20 bp, Artificial Sequence
  Synthetic Polynucleotide
ggcgaaatcaatagtttata

SEQ ID NO: 5155 - DNA, 17 bp, Artificial Sequence
  Synthetic Polynucleotide
ctacgtcaagtatgggc

SEQ ID NO: 5156 - DNA, 18 bp, Artificial Sequence
  Synthetic Polynucleotide
ccaggaggaggagatgga

SEQ ID NO: 5157 - DNA, 17 bp, Artificial Sequence
  Synthetic Polynucleotide
ccaaggtcagtgtgctc

SEQ ID NO: 5158 - DNA, 17 bp, Artificial Sequence
  Synthetic Polynucleotide
gtcagatatgggcgggg

SEQ ID NO: 5159 - DNA, 19 bp, Artificial Sequence
  Synthetic Polynucleotide
tcagaagggctagatcccg

SEQ ID NO: 5160 - DNA, 18 bp, Artificial Sequence
  Synthetic Polynucleotide
agaggaagagattgcagc

SEQ ID NO: 5161 - DNA, 17 bp, Artificial Sequence
  Synthetic Polynucleotide
accagaaggaggcgtgt

SEQ ID NO: 5162 - DNA, 17 bp, Artificial Sequence
  Synthetic Polynucleotide
ttgaggctttgggcgta

SEQ ID NO: 5163 - DNA, 17 bp, Artificial Sequence
  Synthetic Polynucleotide
ttccgtccacttcaatc

SEQ ID NO: 5164 - DNA, 19 bp, Artificial Sequence
  Synthetic Polynucleotide
ataggagtgtgcgtggatt

SEQ ID NO: 5165 - DNA, 19 bp, Artificial Sequence
  Synthetic Polynucleotide
tgtgggttttccatcgtaa

SEQ ID NO: 5166 - DNA, 17 bp, Artificial Sequence
  Synthetic Polynucleotide
cgaagagaaccgtgttt

SEQ ID NO: 5167 - DNA, 20 bp, Artificial Sequence
  Synthetic Polynucleotide
aagttgatacgtcaggtaga

SEQ ID NO: 5168 - DNA, 19 bp, Artificial Sequence
  Synthetic Polynucleotide
aatggtgtcgataagaaac

SEQ ID NO: 5169 - DNA, 17 bp, Artificial Sequence
  Synthetic Polynucleotide
gtcgaaagtaccgccac

SEQ ID NO: 5170 - DNA, 17 bp, Artificial Sequence
  Synthetic Polynucleotide
aaaagatgggttggtgt

SEQ ID NO: 5171 - DNA, 20 bp, Artificial Sequence
  Synthetic Polynucleotide
aaatactaggttttccaagg

SEQ ID NO: 5172 - DNA, 19 bp, Artificial Sequence
  Synthetic Polynucleotide
agagattcggagtgtgtat

SEQ ID NO: 5173 - DNA, 19 bp, Artificial Sequence
  Synthetic Polynucleotide
catctatcaatgtccccaa

SEQ ID NO: 5174 - DNA, 20 bp, Artificial Sequence
  Synthetic Polynucleotide
agaatgaaaagactggtgtt

SEQ ID NO: 5175 - DNA, 17 bp, Artificial Sequence
  Synthetic Polynucleotide
actagacctcgggtaaa

SEQ ID NO: 5176 - DNA, 17 bp, Artificial Sequence
  Synthetic Polynucleotide
ggtgcgaagatggtaag

SEQ ID NO: 5177 - DNA, 20 bp, Artificial Sequence
  Synthetic Polynucleotide
ttagcgtaagttgacaagta

SEQ ID NO: 5178 - DNA, 17 bp, Artificial Sequence
  Synthetic Polynucleotide
gaaaagagtgactgtgc

SEQ ID NO: 5179 - DNA, 19 bp, Artificial Sequence
  Synthetic Polynucleotide
tttcatctcccctttgatc

SEQ ID NO: 5180 - DNA, 20 bp, Artificial Sequence
  Synthetic Polynucleotide
tcaagaaaatggagtgttac

SEQ ID NO: 5181 - DNA, 17 bp, Artificial Sequence
  Synthetic Polynucleotide
tccagcgtcaataaagt

SEQ ID NO: 5182 - DNA, 20 bp, Artificial Sequence
  Synthetic Polynucleotide
aatattcccttgtgccgttt

SEQ ID NO: 5183 - DNA, 17 bp, Artificial Sequence
  Synthetic Polynucleotide
cccctagcgtaataggc

SEQ ID NO: 5184 - DNA, 20 bp, Artificial Sequence
  Synthetic Polynucleotide
tggaagattcaattaaggtc

SEQ ID NO: 5185 - DNA, 18 bp, Artificial Sequence
  Synthetic Polynucleotide
tccttcagaactttccaa

SEQ ID NO: 5186 - DNA, 17 bp, Artificial Sequence
  Synthetic Polynucleotide
cgtagcttttgcttggc

SEQ ID NO: 5187 - DNA, 19 bp, Artificial Sequence
  Synthetic Polynucleotide
tccaaacttagatgtgatg

SEQ ID NO: 5188 - DNA, 18 bp, Artificial Sequence
  Synthetic Polynucleotide
tagaccgctcaatgttga

SEQ ID NO: 5189 - DNA, 18 bp, Artificial Sequence
  Synthetic Polynucleotide
aaggtattcgtaagcctt

SEQ ID NO: 5190 - DNA, 18 bp, Artificial Sequence
  Synthetic Polynucleotide
agcgaagaaactgtatgc

SEQ ID NO: 5191 - DNA, 19 bp, Artificial Sequence
  Synthetic Polynucleotide
gcatcaatgtctctccctc

SEQ ID NO: 5192 - DNA, 19 bp, Artificial Sequence
  Synthetic Polynucleotide
tctagagagtacaacgtca

SEQ ID NO: 5193 - DNA, 17 bp, Artificial Sequence
  Synthetic Polynucleotide
atgatcctcccaccaag

SEQ ID NO: 5194 - DNA, 17 bp, Artificial Sequence
  Synthetic Polynucleotide
gaggtgctgctcaagtt

SEQ ID NO: 5195 - DNA, 18 bp, Artificial Sequence
  Synthetic Polynucleotide
gcatttgaccaccaagtt

SEQ ID NO: 5196 - DNA, 20 bp, Artificial Sequence
  Synthetic Polynucleotide
attctagctctcttcctgaa

SEQ ID NO: 5197 - DNA, 19 bp, Artificial Sequence
  Synthetic Polynucleotide
aacagaaataagggaccga

SEQ ID NO: 5198 - DNA, 19 bp, Artificial Sequence
  Synthetic Polynucleotide
ttgtcttatactcgggcat

SEQ ID NO: 5199 - DNA, 18 bp, Artificial Sequence
  Synthetic Polynucleotide
cttgctgatgagacctgc

SEQ ID NO: 5200 - DNA, 19 bp, Artificial Sequence
  Synthetic Polynucleotide
ttacacgtcaaagaagttt

SEQ ID NO: 5201 - DNA, 20 bp, Artificial Sequence
  Synthetic Polynucleotide
tttatctcaccgattttctc

SEQ ID NO: 5202 - DNA, 20 bp, Artificial Sequence
  Synthetic Polynucleotide
atggatatctcaatgtttgg

SEQ ID NO: 5203 - DNA, 18 bp, Artificial Sequence
  Synthetic Polynucleotide
accttgcttaaaggggtc

SEQ ID NO: 5204 - DNA, 20 bp, Artificial Sequence
  Synthetic Polynucleotide
tcgagaggttgttaaactct

SEQ ID NO: 5205 - DNA, 20 bp, Artificial Sequence
  Synthetic Polynucleotide
gagccaacaaaatccgtctt

SEQ ID NO: 5206 - DNA, 20 bp, Artificial Sequence
  Synthetic Polynucleotide
tatttaccaaagggattttc

SEQ ID NO: 5207 - DNA, 19 bp, Artificial Sequence
  Synthetic Polynucleotide
caaaatgtgtcgaaggttg

SEQ ID NO: 5208 - DNA, 19 bp, Artificial Sequence
  Synthetic Polynucleotide
agagatgtgctgatgttca

SEQ ID NO: 5209 - DNA, 19 bp, Artificial Sequence
  Synthetic Polynucleotide
atagtccaagactttaccg

SEQ ID NO: 5210 - DNA, 19 bp, Artificial Sequence
  Synthetic Polynucleotide
tggcatcttacagaaactc

SEQ ID NO: 5211 - DNA, 18 bp, Artificial Sequence
  Synthetic Polynucleotide
tttgtgtccaacatagca

SEQ ID NO: 5212 - DNA, 20 bp, Artificial Sequence
  Synthetic Polynucleotide
ctccctggtgatctggagta

SEQ ID NO: 5213 - DNA, 19 bp, Artificial Sequence
  Synthetic Polynucleotide
gcgctttaaatcacactcc

SEQ ID NO: 5214 - DNA, 19 bp, Artificial Sequence
  Synthetic Polynucleotide
aaacaaacagctttcgttc

SEQ ID NO: 5215 - DNA, 18 bp, Artificial Sequence
  Synthetic Polynucleotide
aaaggcacaacctcaaag

SEQ ID NO: 5216 - DNA, 20 bp, Artificial Sequence
  Synthetic Polynucleotide
agaacagtatgacgagtttt

SEQ ID NO: 5217 - DNA, 19 bp, Artificial Sequence
  Synthetic Polynucleotide
cacccacataggatttatc

SEQ ID NO: 5218 - DNA, 18 bp, Artificial Sequence
  Synthetic Polynucleotide
gctcattacgttcaagtg

SEQ ID NO: 5219 - DNA, 18 bp, Artificial Sequence
  Synthetic Polynucleotide
gccaacactaatggctgc

SEQ ID NO: 5220 - DNA, 17 bp, Artificial Sequence
  Synthetic Polynucleotide
ctccttccgccaaactg

SEQ ID NO: 5221 - DNA, 19 bp, Artificial Sequence
  Synthetic Polynucleotide
gttgtcttaggtagtccta

SEQ ID NO: 5222 - DNA, 18 bp, Artificial Sequence
  Synthetic Polynucleotide
caaggttcacatgactgt

SEQ ID NO: 5223 - DNA, 19 bp, Artificial Sequence
  Synthetic Polynucleotide
accaaacaaaacaaaccaa

SEQ ID NO: 5224 - DNA, 17 bp, Artificial Sequence
  Synthetic Polynucleotide
ttggtgtcgagataacc

SEQ ID NO: 5225 - DNA, 20 bp, Artificial Sequence
  Synthetic Polynucleotide
aaacataaaaggccccaaac

SEQ ID NO: 5226 - DNA, 18 bp, Artificial Sequence
  Synthetic Polynucleotide
aagaatgtctgtctgtca

SEQ ID NO: 5227 - DNA, 18 bp, Artificial Sequence
  Synthetic Polynucleotide
caaacccatgttatcgcc

SEQ ID NO: 5228 - DNA, 20 bp, Artificial Sequence
  Synthetic Polynucleotide
gaagagaatatccatcccgc

SEQ ID NO: 5229 - DNA, 18 bp, Artificial Sequence
  Synthetic Polynucleotide
gaagaaccgagaaagaga

SEQ ID NO: 5230 - DNA, 20 bp, Artificial Sequence
  Synthetic Polynucleotide
atacggctttcaaagtgaaa

SEQ ID NO: 5231 - DNA, 18 bp, Artificial Sequence
  Synthetic Polynucleotide
aactggaactgcatcatg

SEQ ID NO: 5232 - DNA, 20 bp, Artificial Sequence
  Synthetic Polynucleotide
ctccaatgacaatctggata

SEQ ID NO: 5233 - DNA, 17 bp, Artificial Sequence
  Synthetic Polynucleotide
aaaggctcatcagcttt

SEQ ID NO: 5234 - DNA, 18 bp, Artificial Sequence
  Synthetic Polynucleotide
tttgataaccgcaaacgt

SEQ ID NO: 5235 - DNA, 17 bp, Artificial Sequence
  Synthetic Polynucleotide
cctgctaaacaggagct

SEQ ID NO: 5236 - DNA, 18 bp, Artificial Sequence
  Synthetic Polynucleotide
gttttctcccaacaagag

SEQ ID NO: 5237 - DNA, 17 bp, Artificial Sequence
  Synthetic Polynucleotide
cacactgtcgccactaa

SEQ ID NO: 5238 - DNA, 18 bp, Artificial Sequence
  Synthetic Polynucleotide
cacctacccacatcattt

SEQ ID NO: 5239 - DNA, 17 bp, Artificial Sequence
  Synthetic Polynucleotide
gtgtccaaatgccactc

SEQ ID NO: 5240 - DNA, 18 bp, Artificial Sequence
  Synthetic Polynucleotide
tacatacgctggcattaa

SEQ ID NO: 5241 - DNA, 18 bp, Artificial Sequence
  Synthetic Polynucleotide
acacactgtcgccactaa

SEQ ID NO: 5242 - DNA, 19 bp, Artificial Sequence
  Synthetic Polynucleotide
aaatgttgcaggcgttgtg

SEQ ID NO: 5243 - DNA, 19 bp, Artificial Sequence
  Synthetic Polynucleotide
aagccttcccacacacata

SEQ ID NO: 5244 - DNA, 18 bp, Artificial Sequence
  Synthetic Polynucleotide
aacaaacagctttcgttc

SEQ ID NO: 5245 - DNA, 18 bp, Artificial Sequence
  Synthetic Polynucleotide
catcacgttgaatggcag

SEQ ID NO: 5246 - DNA, 17 bp, Artificial Sequence
  Synthetic Polynucleotide
ggatcccatgtaccaga

SEQ ID NO: 5247 - DNA, 19 bp, Artificial Sequence
  Synthetic Polynucleotide
tgagcaccacctcatttcc

SEQ ID NO: 5248 - DNA, 19 bp, Artificial Sequence
  Synthetic Polynucleotide
taccacattgtagattggg

SEQ ID NO: 5249 - DNA, 20 bp, Artificial Sequence
  Synthetic Polynucleotide
gccgatatccactccaatat

SEQ ID NO: 5250 - DNA, 18 bp, Artificial Sequence
  Synthetic Polynucleotide
agcgttgatgcgattttg

SEQ ID NO: 5251 - DNA, 20 bp, Artificial Sequence
  Synthetic Polynucleotide
tgcactagccttcttgaaaa

SEQ ID NO: 5252 - DNA, 18 bp, Artificial Sequence
  Synthetic Polynucleotide
tcagcacccttcatagct

SEQ ID NO: 5253 - DNA, 18 bp, Artificial Sequence
  Synthetic Polynucleotide
caaagtcaagtcgatcac

SEQ ID NO: 5254 - DNA, 20 bp, Artificial Sequence
  Synthetic Polynucleotide
ttctgactttgatgagaact

SEQ ID NO: 5255 - DNA, 18 bp, Artificial Sequence
  Synthetic Polynucleotide
attctaaactagcccgtt

SEQ ID NO: 5256 - DNA, 18 bp, Artificial Sequence
  Synthetic Polynucleotide
gccttacataccaggccg

SEQ ID NO: 5257 - DNA, 17 bp, Artificial Sequence
  Synthetic Polynucleotide
agtccccacttatcgtg

SEQ ID NO: 5258 - DNA, 18 bp, Artificial Sequence
  Synthetic Polynucleotide
cactttgcaggaaaagca

SEQ ID NO: 5259 - DNA, 17 bp, Artificial Sequence
  Synthetic Polynucleotide
cccactgctgaacatca

SEQ ID NO: 5260 - DNA, 17 bp, Artificial Sequence
  Synthetic Polynucleotide
acgcagactgttgattc

SEQ ID NO: 5261 - DNA, 19 bp, Artificial Sequence
  Synthetic Polynucleotide
ccatcatcactcaaaatca

SEQ ID NO: 5262 - DNA, 19 bp, Artificial Sequence
  Synthetic Polynucleotide
gtgatcgtgctatgccaaa

SEQ ID NO: 5263 - DNA, 20 bp, Artificial Sequence
  Synthetic Polynucleotide
tgtgaacaaaattcatgtgg

SEQ ID NO: 5264 - DNA, 19 bp, Artificial Sequence
  Synthetic Polynucleotide
taaaaccaggtcactttaa

SEQ ID NO: 5265 - DNA, 20 bp, Artificial Sequence
  Synthetic Polynucleotide
acatggtcataacaacactt

SEQ ID NO: 5266 - DNA, 17 bp, Artificial Sequence
  Synthetic Polynucleotide
ctgacggtacgctcatg

SEQ ID NO: 5267 - DNA, 20 bp, Artificial Sequence
  Synthetic Polynucleotide
ttgcaaatcctctataaagc

SEQ ID NO: 5268 - DNA, 20 bp, Artificial Sequence
  Synthetic Polynucleotide
tgtgcattcgctatgtttag

SEQ ID NO: 5269 - DNA, 20 bp, Artificial Sequence
  Synthetic Polynucleotide
gagtcgagtttcaatgtttg

SEQ ID NO: 5270 - DNA, 20 bp, Artificial Sequence
  Synthetic Polynucleotide
acacacgtccaactcagttt

SEQ ID NO: 5271 - DNA, 20 bp, Artificial Sequence
  Synthetic Polynucleotide
cccaacgctaggctcaaaag

SEQ ID NO: 5272 - DNA, 19 bp, Artificial Sequence
  Synthetic Polynucleotide
gttgcttgggctacctagt

SEQ ID NO: 5273 - DNA, 19 bp, Artificial Sequence
  Synthetic Polynucleotide
caccatcatcactcaaaat

SEQ ID NO: 5274 - DNA, 20 bp, Artificial Sequence
  Synthetic Polynucleotide
tgctattagtgctaagaata

SEQ ID NO: 5275 - DNA, 17 bp, Artificial Sequence
  Synthetic Polynucleotide
gaaccaacataacccca

SEQ ID NO: 5276 - DNA, 17 bp, Artificial Sequence
  Synthetic Polynucleotide
acaatacagggtcctcc

SEQ ID NO: 5277 - DNA, 19 bp, Artificial Sequence
  Synthetic Polynucleotide
gcggatctttaattactcg

SEQ ID NO: 5278 - DNA, 18 bp, Artificial Sequence
  Synthetic Polynucleotide
tatgctcagatcgccagt

SEQ ID NO: 5279 - DNA, 20 bp, Artificial Sequence
  Synthetic Polynucleotide
agcggatctttaaacttctc

SEQ ID NO: 5280 - DNA, 17 bp, Artificial Sequence
  Synthetic Polynucleotide
tgacacacaggttgaga

SEQ ID NO: 5281 - DNA, 20 bp, Artificial Sequence
  Synthetic Polynucleotide
aactatccaaaccaccattt

SEQ ID NO: 5282 - DNA, 17 bp, Artificial Sequence
  Synthetic Polynucleotide
taccactttccacttta

SEQ ID NO: 5283 - DNA, 18 bp, Artificial Sequence
  Synthetic Polynucleotide
gtcacaacattacttgca

SEQ ID NO: 5284 - DNA, 20 bp, Artificial Sequence
  Synthetic Polynucleotide
tatagagggtatcatagcgc

SEQ ID NO: 5285 - DNA, 17 bp, Artificial Sequence
  Synthetic Polynucleotide
atggcgttcaccatgtt

SEQ ID NO: 5286 - DNA, 17 bp, Artificial Sequence
  Synthetic Polynucleotide
tggctcggcaaggatgg

SEQ ID NO: 5287 - DNA, 18 bp, Artificial Sequence
  Synthetic Polynucleotide
tcttggacggagttgcgt

SEQ ID NO: 5288 - DNA, 18 bp, Artificial Sequence
  Synthetic Polynucleotide
gcggatcattgaactgga

SEQ ID NO: 5289 - DNA, 18 bp, Artificial Sequence
  Synthetic Polynucleotide
ctcatctgcttgttcatc

SEQ ID NO: 5290 - DNA, 20 bp, Artificial Sequence
  Synthetic Polynucleotide
agaagagaagaagaagctcg

SEQ ID NO: 5291 - DNA, 17 bp, Artificial Sequence
  Synthetic Polynucleotide
aacatagtcacctcacg

SEQ ID NO: 5292 - DNA, 20 bp, Artificial Sequence
  Synthetic Polynucleotide
tgtggcattctgcaaaccag

SEQ ID NO: 5293 - DNA, 17 bp, Artificial Sequence
  Synthetic Polynucleotide
cgtcttgatgacgacag

SEQ ID NO: 5294 - DNA, 17 bp, Artificial Sequence
  Synthetic Polynucleotide
gcttacacctttcacca

SEQ ID NO: 5295 - DNA, 18 bp, Artificial Sequence
  Synthetic Polynucleotide
cattcatctgcgggtttt

SEQ ID NO: 5296 - DNA, 17 bp, Artificial Sequence
  Synthetic Polynucleotide
ggcggtcataagggcaa

SEQ ID NO: 5297 - DNA, 17 bp, Artificial Sequence
  Synthetic Polynucleotide
tacctatggctaggagt

SEQ ID NO: 5298 - DNA, 17 bp, Artificial Sequence
  Synthetic Polynucleotide
actccctcaccaccctg

SEQ ID NO: 5299 - DNA, 18 bp, Artificial Sequence
  Synthetic Polynucleotide
atgacgacgaatacgatc

SEQ ID NO: 5300 - DNA, 20 bp, Artificial Sequence
  Synthetic Polynucleotide
atcacctaagcgtaaacgac

SEQ ID NO: 5301 - DNA, 18 bp, Artificial Sequence
  Synthetic Polynucleotide
gtagcgttgcattgaagc

SEQ ID NO: 5302 - DNA, 17 bp, Artificial Sequence
  Synthetic Polynucleotide
cattgatggatacggct

SEQ ID NO: 5303 - DNA, 17 bp, Artificial Sequence
  Synthetic Polynucleotide
aggtatgtcaaaacggc

SEQ ID NO: 5304 - DNA, 19 bp, Artificial Sequence
  Synthetic Polynucleotide
gctgtacacactcagacta

SEQ ID NO: 5305 - DNA, 17 bp, Artificial Sequence
  Synthetic Polynucleotide
cacctgattggacaact

SEQ ID NO: 5306 - DNA, 20 bp, Artificial Sequence
  Synthetic Polynucleotide
tgtcaaagagagttgggctt

SEQ ID NO: 5307 - DNA, 19 bp, Artificial Sequence
  Synthetic Polynucleotide
tatttggagtttccacatc

SEQ ID NO: 5308 - DNA, 18 bp, Artificial Sequence
  Synthetic Polynucleotide
ctatttagggtgaggagc

SEQ ID NO: 5309 - DNA, 20 bp, Artificial Sequence
  Synthetic Polynucleotide
gaacatgaatctgatgcctt

SEQ ID NO: 5310 - DNA, 17 bp, Artificial Sequence
  Synthetic Polynucleotide
gagttgcatgttgacac

SEQ ID NO: 5311 - DNA, 19 bp, Artificial Sequence
  Synthetic Polynucleotide
agttgggtgctgaactgaa

SEQ ID NO: 5312 - DNA, 18 bp, Artificial Sequence
  Synthetic Polynucleotide
acgaccttggatgtactg

SEQ ID NO: 5313 - DNA, 19 bp, Artificial Sequence
  Synthetic Polynucleotide
cttagaaagaggttgcgaa

SEQ ID NO: 5314 - DNA, 18 bp, Artificial Sequence
  Synthetic Polynucleotide
ggaagtgtgtatgaagcc

SEQ ID NO: 5315 - DNA, 17 bp, Artificial Sequence
  Synthetic Polynucleotide
aatggttgagcgttgac

SEQ ID NO: 5316 - DNA, 19 bp, Artificial Sequence
  Synthetic Polynucleotide
cgctatgcgaaatagagtt

SEQ ID NO: 5317 - DNA, 17 bp, Artificial Sequence
  Synthetic Polynucleotide
tctagttgggttgagtg

SEQ ID NO: 5318 - DNA, 18 bp, Artificial Sequence
  Synthetic Polynucleotide
attgttcttcaatggtgc

SEQ ID NO: 5319 - DNA, 19 bp, Artificial Sequence
  Synthetic Polynucleotide
gaaaccttgggtgtaaatt

SEQ ID NO: 5320 - DNA, 17 bp, Artificial Sequence
  Synthetic Polynucleotide
ggttccactcgtagaga

SEQ ID NO: 5321 - DNA, 19 bp, Artificial Sequence
  Synthetic Polynucleotide
gccccgccagtatttgaaa

SEQ ID NO: 5322 - DNA, 18 bp, Artificial Sequence
  Synthetic Polynucleotide
agattggggcttgttcga

SEQ ID NO: 5323 - DNA, 18 bp, Artificial Sequence
  Synthetic Polynucleotide
accaggtattttggtgag

SEQ ID NO: 5324 - DNA, 20 bp, Artificial Sequence
  Synthetic Polynucleotide
taatgttgttacgaatccta

SEQ ID NO: 5325 - DNA, 19 bp, Artificial Sequence
  Synthetic Polynucleotide
caagtgaggaggtgataag

SEQ ID NO: 5326 - DNA, 17 bp, Artificial Sequence
  Synthetic Polynucleotide
gacgattttgattgcgg

SEQ ID NO: 5327 - DNA, 17 bp, Artificial Sequence
  Synthetic Polynucleotide
ttgcctatggtcatcaa

SEQ ID NO: 5328 - DNA, 20 bp, Artificial Sequence
  Synthetic Polynucleotide
tgagcaggagttttgggaca

SEQ ID NO: 5329 - DNA, 19 bp, Artificial Sequence
  Synthetic Polynucleotide
tggtctagctgttacaaaa

SEQ ID NO: 5330 - DNA, 19 bp, Artificial Sequence
  Synthetic Polynucleotide
ccatgggaaagtgataaaa

SEQ ID NO: 5331 - DNA, 18 bp, Artificial Sequence
  Synthetic Polynucleotide
gtttctggctgaggacgg

SEQ ID NO: 5332 - DNA, 19 bp, Artificial Sequence
  Synthetic Polynucleotide
tagatgcaataaactcagg

SEQ ID NO: 5333 - DNA, 17 bp, Artificial Sequence
  Synthetic Polynucleotide
gcccaataaaccttcca

SEQ ID NO: 5334 - DNA, 18 bp, Artificial Sequence
  Synthetic Polynucleotide
ggcaacaatgggaccgac

SEQ ID NO: 5335 - DNA, 20 bp, Artificial Sequence
  Synthetic Polynucleotide
gtgttgagcaccaaaatttt

SEQ ID NO: 5336 - DNA, 17 bp, Artificial Sequence
  Synthetic Polynucleotide
ctgcaacatggacagat

SEQ ID NO: 5337 - DNA, 17 bp, Artificial Sequence
  Synthetic Polynucleotide
agcaggatctctggtct

SEQ ID NO: 5338 - DNA, 18 bp, Artificial Sequence
  Synthetic Polynucleotide
ggttagaggagacccctc

SEQ ID NO: 5339 - DNA, 18 bp, Artificial Sequence
  Synthetic Polynucleotide
tatcaggcagtaccacaa

SEQ ID NO: 5340 - DNA, 17 bp, Artificial Sequence
  Synthetic Polynucleotide
gagagccatagtggtct

SEQ ID NO: 5341 - DNA, 18 bp, Artificial Sequence
  Synthetic Polynucleotide
aggtgtcaatatgctgtt

SEQ ID NO: 5342 - DNA, 18 bp, Artificial Sequence
  Synthetic Polynucleotide
actagaggttagaggaga

SEQ ID NO: 5343 - DNA, 17 bp, Artificial Sequence
  Synthetic Polynucleotide
caactccatgtgccatg

SEQ ID NO: 5344 - DNA, 17 bp, Artificial Sequence
  Synthetic Polynucleotide
ctgagtacaggacagtc

SEQ ID NO: 5345 - DNA, 18 bp, Artificial Sequence
  Synthetic Polynucleotide
tctctttcccatcatgtt

SEQ ID NO: 5346 - DNA, 17 bp, Artificial Sequence
  Synthetic Polynucleotide
ctcctttgtgacatcgg

SEQ ID NO: 5347 - DNA, 19 bp, Artificial Sequence
  Synthetic Polynucleotide
aactccatgtgccatgtac

SEQ ID NO: 5348 - DNA, 17 bp, Artificial Sequence
  Synthetic Polynucleotide
atgcccttagtaggact

SEQ ID NO: 5349 - DNA, 20 bp, Artificial Sequence
  Synthetic Polynucleotide
ggacagttgtattccattga

SEQ ID NO: 5350 - DNA, 20 bp, Artificial Sequence
  Synthetic Polynucleotide
ttgctaggcaataaacacat

SEQ ID NO: 5351 - DNA, 17 bp, Artificial Sequence
  Synthetic Polynucleotide
gcccattcgctcgacaa

SEQ ID NO: 5352 - DNA, 18 bp, Artificial Sequence
  Synthetic Polynucleotide
tcgtcgttaaaccgagcc

SEQ ID NO: 5353 - DNA, 19 bp, Artificial Sequence
  Synthetic Polynucleotide
cattccattttctggcgtt

SEQ ID NO: 5354 - DNA, 17 bp, Artificial Sequence
  Synthetic Polynucleotide
tgtgagccccgtccaag

SEQ ID NO: 5355 - DNA, 17 bp, Artificial Sequence
  Synthetic Polynucleotide
cacacaggtgccattct

SEQ ID NO: 5356 - DNA, 20 bp, Artificial Sequence
  Synthetic Polynucleotide
gcttaggagaacaagagctg

SEQ ID NO: 5357 - DNA, 17 bp, Artificial Sequence
  Synthetic Polynucleotide
ctatcaggcagtaccac

SEQ ID NO: 5358 - DNA, 19 bp, Artificial Sequence
  Synthetic Polynucleotide
ggcgttagtatgagtgtcg

SEQ ID NO: 5359 - DNA, 18 bp, Artificial Sequence
  Synthetic Polynucleotide
acccatcaccttcatcca

SEQ ID NO: 5360 - DNA, 18 bp, Artificial Sequence
  Synthetic Polynucleotide
cggcgtctatactacctc

SEQ ID NO: 5361 - DNA, 20 bp, Artificial Sequence
  Synthetic Polynucleotide
atccatccataacattgaac

SEQ ID NO: 5362 - DNA, 18 bp, Artificial Sequence
  Synthetic Polynucleotide
tttcaaggatctgaaccc

SEQ ID NO: 5363 - DNA, 19 bp, Artificial Sequence
  Synthetic Polynucleotide
tttcccatcatgttgtaca

SEQ ID NO: 5364 - DNA, 17 bp, Artificial Sequence
  Synthetic Polynucleotide
aaagtgcggagccatgc

SEQ ID NO: 5365 - DNA, 18 bp, Artificial Sequence
  Synthetic Polynucleotide
aacttatccccattgtga

SEQ ID NO: 5366 - DNA, 17 bp, Artificial Sequence
  Synthetic Polynucleotide
gacatccgagagtttgt

SEQ ID NO: 5367 - DNA, 17 bp, Artificial Sequence
  Synthetic Polynucleotide
agggagaacaagaaccg

SEQ ID NO: 5368 - DNA, 17 bp, Artificial Sequence
  Synthetic Polynucleotide
ggccatctggtacatgt

SEQ ID NO: 5369 - DNA, 17 bp, Artificial Sequence
  Synthetic Polynucleotide
ttccccatcatgttgta

SEQ ID NO: 5370 - DNA, 17 bp, Artificial Sequence
  Synthetic Polynucleotide
ggacagcagagagtgtt

SEQ ID NO: 5371 - DNA, 18 bp, Artificial Sequence
  Synthetic Polynucleotide
ttctgtagtctttcctgc

SEQ ID NO: 5372 - DNA, 20 bp, Artificial Sequence
  Synthetic Polynucleotide
tatgagatagatgaatccca

SEQ ID NO: 5373 - DNA, 20 bp, Artificial Sequence
  Synthetic Polynucleotide
tcagcatagccctcttcagt

SEQ ID NO: 5374 - DNA, 20 bp, Artificial Sequence
  Synthetic Polynucleotide
aaacttagtagtgtttgtga

SEQ ID NO: 5375 - DNA, 18 bp, Artificial Sequence
  Synthetic Polynucleotide
acaccaacagtcaatgtc

SEQ ID NO: 5376 - DNA, 19 bp, Artificial Sequence
  Synthetic Polynucleotide
gttcttcagatttacagca

SEQ ID NO: 5377 - DNA, 17 bp, Artificial Sequence
  Synthetic Polynucleotide
gcctcagccaacttcat

SEQ ID NO: 5378 - DNA, 19 bp, Artificial Sequence
  Synthetic Polynucleotide
cgggttgacaatgccagtg

SEQ ID NO: 5379 - DNA, 18 bp, Artificial Sequence
  Synthetic Polynucleotide
ctctccatccacatccaa

SEQ ID NO: 5380 - DNA, 18 bp, Artificial Sequence
  Synthetic Polynucleotide
aggatcggagtcaatgga

SEQ ID NO: 5381 - DNA, 20 bp, Artificial Sequence
  Synthetic Polynucleotide
ctttcctaatgtcctctatg

SEQ ID NO: 5382 - DNA, 18 bp, Artificial Sequence
  Synthetic Polynucleotide
ggagtgttccataccatg

SEQ ID NO: 5383 - DNA, 17 bp, Artificial Sequence
  Synthetic Polynucleotide
gtctttcccgtcagctc

SEQ ID NO: 5384 - DNA, 17 bp, Artificial Sequence
  Synthetic Polynucleotide
tgcggaagatcgaaact

SEQ ID NO: 5385 - DNA, 18 bp, Artificial Sequence
  Synthetic Polynucleotide
aatgtcctttctcacctt

SEQ ID NO: 5386 - DNA, 17 bp, Artificial Sequence
  Synthetic Polynucleotide
cgaacatcaaggtgcag

SEQ ID NO: 5387 - DNA, 17 bp, Artificial Sequence
  Synthetic Polynucleotide
tgtgcttcatccatgat

SEQ ID NO: 5388 - DNA, 19 bp, Artificial Sequence
  Synthetic Polynucleotide
ggctcctactagggtagtc

SEQ ID NO: 5389 - DNA, 20 bp, Artificial Sequence
  Synthetic Polynucleotide
cggtgtcagtagtgtaagcc

SEQ ID NO: 5390 - DNA, 18 bp, Artificial Sequence
  Synthetic Polynucleotide
gtgctactcgtcatgttt

SEQ ID NO: 5391 - DNA, 20 bp, Artificial Sequence
  Synthetic Polynucleotide
gaatgtccgttgccacaatt

SEQ ID NO: 5392 - DNA, 18 bp, Artificial Sequence
  Synthetic Polynucleotide
cacagttgaaaccatctt

SEQ ID NO: 5393 - DNA, 18 bp, Artificial Sequence
  Synthetic Polynucleotide
cagcctcattattagcgg

SEQ ID NO: 5394 - DNA, 18 bp, Artificial Sequence
  Synthetic Polynucleotide
atgtcgtgttgttgctag

SEQ ID NO: 5395 - DNA, 18 bp, Artificial Sequence
  Synthetic Polynucleotide
tctggtcctctatagtgt

SEQ ID NO: 5396 - DNA, 18 bp, Artificial Sequence
  Synthetic Polynucleotide
cttccaaaagcagtgata

SEQ ID NO: 5397 - DNA, 18 bp, Artificial Sequence
  Synthetic Polynucleotide
gtggctcaatggagtaac

SEQ ID NO: 5398 - DNA, 19 bp, Artificial Sequence
  Synthetic Polynucleotide
tgaatacctggaaatcgaa

SEQ ID NO: 5399 - DNA, 17 bp, Artificial Sequence
  Synthetic Polynucleotide
cgtggtgagattcactg

SEQ ID NO: 5400 - DNA, 20 bp, Artificial Sequence
  Synthetic Polynucleotide
gcgccagttttcactaagtg

SEQ ID NO: 5401 - DNA, 18 bp, Artificial Sequence
  Synthetic Polynucleotide
tgacattcgtctgttcca

SEQ ID NO: 5402 - DNA, 17 bp, Artificial Sequence
  Synthetic Polynucleotide
cattccacctgcttggg

SEQ ID NO: 5403 - DNA, 18 bp, Artificial Sequence
  Synthetic Polynucleotide
ccgcctcagtcactgtct

SEQ ID NO: 5404 - DNA, 17 bp, Artificial Sequence
  Synthetic Polynucleotide
ctcaatccctcagtggc

SEQ ID NO: 5405 - DNA, 17 bp, Artificial Sequence
  Synthetic Polynucleotide
aaacttaacccgttcca

SEQ ID NO: 5406 - DNA, 20 bp, Artificial Sequence
  Synthetic Polynucleotide
atgaagcattcataccaaat

SEQ ID NO: 5407 - DNA, 19 bp, Artificial Sequence
  Synthetic Polynucleotide
ttcatacaatcaaaccaga

SEQ ID NO: 5408 - DNA, 17 bp, Artificial Sequence
  Synthetic Polynucleotide
actgctgcctttgtgaa

SEQ ID NO: 5409 - DNA, 17 bp, Artificial Sequence
  Synthetic Polynucleotide
gcaccacacttacacac

SEQ ID NO: 5410 - DNA, 18 bp, Artificial Sequence
  Synthetic Polynucleotide
gtacatcgccttggtcgg

SEQ ID NO: 5411 - DNA, 19 bp, Artificial Sequence
  Synthetic Polynucleotide
gtatcacctcagttactcc

SEQ ID NO: 5412 - DNA, 17 bp, Artificial Sequence
  Synthetic Polynucleotide
atgccacttacaccgcc

SEQ ID NO: 5413 - DNA, 18 bp, Artificial Sequence
  Synthetic Polynucleotide
gtatcacctcggttactc

SEQ ID NO: 5414 - DNA, 20 bp, Artificial Sequence
  Synthetic Polynucleotide
tgtgagtacatctcattcca

SEQ ID NO: 5415 - DNA, 19 bp, Artificial Sequence
  Synthetic Polynucleotide
gctcgcaaaattcacctct

SEQ ID NO: 5416 - DNA, 19 bp, Artificial Sequence
  Synthetic Polynucleotide
tgatagtaatagacgcccc

SEQ ID NO: 5417 - DNA, 20 bp, Artificial Sequence
  Synthetic Polynucleotide
taggtcatacgcactcgatg

SEQ ID NO: 5418 - DNA, 17 bp, Artificial Sequence
  Synthetic Polynucleotide
ctcgctactcctatagc

SEQ ID NO: 5419 - DNA, 19 bp, Artificial Sequence
  Synthetic Polynucleotide
cgattccacatacccagag

SEQ ID NO: 5420 - DNA, 19 bp, Artificial Sequence
  Synthetic Polynucleotide
ggcctcaagtttctcccag

SEQ ID NO: 5421 - DNA, 17 bp, Artificial Sequence
  Synthetic Polynucleotide
tactacatcaatgccac

SEQ ID NO: 5422 - DNA, 18 bp, Artificial Sequence
  Synthetic Polynucleotide
ggaatatccccttctgcg

SEQ ID NO: 5423 - DNA, 18 bp, Artificial Sequence
  Synthetic Polynucleotide
ttcgcctacaaattaggt

SEQ ID NO: 5424 - DNA, 18 bp, Artificial Sequence
  Synthetic Polynucleotide
aggcaaatatcctccttc

SEQ ID NO: 5425 - DNA, 20 bp, Artificial Sequence
  Synthetic Polynucleotide
agcaccttcttgttcaatac

SEQ ID NO: 5426 - DNA, 18 bp, Artificial Sequence
  Synthetic Polynucleotide
tctgtccagttgtccttc

SEQ ID NO: 5427 - DNA, 20 bp, Artificial Sequence
  Synthetic Polynucleotide
tctacaagcctgacacagat

SEQ ID NO: 5428 - DNA, 17 bp, Artificial Sequence
  Synthetic Polynucleotide
acgtccagaaccctgta

SEQ ID NO: 5429 - DNA, 19 bp, Artificial Sequence
  Synthetic Polynucleotide
caacaacaaatacatgagc

SEQ ID NO: 5430 - DNA, 18 bp, Artificial Sequence
  Synthetic Polynucleotide
aaacttaaccccgttcca

SEQ ID NO: 5431 - DNA, 17 bp, Artificial Sequence
  Synthetic Polynucleotide
tacatcaaactcaacgc

SEQ ID NO: 5432 - DNA, 19 bp, Artificial Sequence
  Synthetic Polynucleotide
tccattttcttcacccact

SEQ ID NO: 5433 - DNA, 17 bp, Artificial Sequence
  Synthetic Polynucleotide
catcaatgccacacaca

SEQ ID NO: 5434 - DNA, 17 bp, Artificial Sequence
  Synthetic Polynucleotide
ccaccagactttcactg

SEQ ID NO: 5435 - DNA, 17 bp, Artificial Sequence
  Synthetic Polynucleotide
ctttcctcaactccgat

SEQ ID NO: 5436 - DNA, 17 bp, Artificial Sequence
  Synthetic Polynucleotide
tccagagccctgtaaac

SEQ ID NO: 5437 - DNA, 17 bp, Artificial Sequence
  Synthetic Polynucleotide
aactggtctcgaaaagg

SEQ ID NO: 5438 - DNA, 17 bp, Artificial Sequence
  Synthetic Polynucleotide
agctgttgtggtaacag

SEQ ID NO: 5439 - DNA, 18 bp, Artificial Sequence
  Synthetic Polynucleotide
cctcattcacatagctta

SEQ ID NO: 5440 - DNA, 17 bp, Artificial Sequence
  Synthetic Polynucleotide
gacctggaagaggcagt

SEQ ID NO: 5441 - DNA, 19 bp, Artificial Sequence
  Synthetic Polynucleotide
gtgtgcgtgaagttttctc

SEQ ID NO: 5442 - DNA, 18 bp, Artificial Sequence
  Synthetic Polynucleotide
ctcacctaatctgtaggc

SEQ ID NO: 5443 - DNA, 18 bp, Artificial Sequence
  Synthetic Polynucleotide
gcgtgtcaaaggagtttc

SEQ ID NO: 5444 - DNA, 18 bp, Artificial Sequence
  Synthetic Polynucleotide
ggaatatccccttctgcg

SEQ ID NO: 5445 - DNA, 18 bp, Artificial Sequence
  Synthetic Polynucleotide
gttccaatgttttgtgga

SEQ ID NO: 5446 - DNA, 17 bp, Artificial Sequence
  Synthetic Polynucleotide
gaacattctgtgttggc

SEQ ID NO: 5447 - DNA, 19 bp, Artificial Sequence
  Synthetic Polynucleotide
atcaacaagccaaagatga

SEQ ID NO: 5448 - DNA, 17 bp, Artificial Sequence
  Synthetic Polynucleotide
tagtcatcatgtcctcc

SEQ ID NO: 5449 - DNA, 17 bp, Artificial Sequence
  Synthetic Polynucleotide
gtgccctgatggaatct

SEQ ID NO: 5450 - DNA, 19 bp, Artificial Sequence
  Synthetic Polynucleotide
tgaaaagcatatttgccat

SEQ ID NO: 5451 - DNA, 19 bp, Artificial Sequence
  Synthetic Polynucleotide
tcattgagaagtcccctgg

SEQ ID NO: 5452 - DNA, 19 bp, Artificial Sequence
  Synthetic Polynucleotide
tctaagttcctccctaact

SEQ ID NO: 5453 - DNA, 20 bp, Artificial Sequence
  Synthetic Polynucleotide
gagtctgattatgaagcatt

SEQ ID NO: 5454 - DNA, 18 bp, Artificial Sequence
  Synthetic Polynucleotide
tgatctgataacccctct

SEQ ID NO: 5455 - DNA, 18 bp, Artificial Sequence
  Synthetic Polynucleotide
gctaaagcagcccaaaca

SEQ ID NO: 5456 - DNA, 19 bp, Artificial Sequence
  Synthetic Polynucleotide
cttcgttgaataaccatga

SEQ ID NO: 5457 - DNA, 18 bp, Artificial Sequence
  Synthetic Polynucleotide
tagcgaagccctgtacat

SEQ ID NO: 5458 - DNA, 20 bp, Artificial Sequence
  Synthetic Polynucleotide
gaaaccgtcgaagtcatagt

SEQ ID NO: 5459 - DNA, 19 bp, Artificial Sequence
  Synthetic Polynucleotide
atgaagagatgcccgaagt

SEQ ID NO: 5460 - DNA, 18 bp, Artificial Sequence
  Synthetic Polynucleotide
aaacttaaccccgttcca

SEQ ID NO: 5461 - DNA, 17 bp, Artificial Sequence
  Synthetic Polynucleotide
agttcacactttcccca

SEQ ID NO: 5462 - DNA, 18 bp, Artificial Sequence
  Synthetic Polynucleotide
tcgatttaattctcgtcc

SEQ ID NO: 5463 - DNA, 19 bp, Artificial Sequence
  Synthetic Polynucleotide
gactccgtcaaagaagtcg

SEQ ID NO: 5464 - DNA, 17 bp, Artificial Sequence
  Synthetic Polynucleotide
ttcagttacgtggtcgc

SEQ ID NO: 5465 - DNA, 17 bp, Artificial Sequence
  Synthetic Polynucleotide
gctgttcatagccctca

SEQ ID NO: 5466 - DNA, 18 bp, Artificial Sequence
  Synthetic Polynucleotide
cactctcaccctgtttgc

SEQ ID NO: 5467 - DNA, 17 bp, Artificial Sequence
  Synthetic Polynucleotide
tgctggaaacaaacgat

SEQ ID NO: 5468 - DNA, 18 bp, Artificial Sequence
  Synthetic Polynucleotide
atggctgtgaagaagaga

SEQ ID NO: 5469 - DNA, 20 bp, Artificial Sequence
  Synthetic Polynucleotide
aacacgctttcctcttgtcc

SEQ ID NO: 5470 - DNA, 20 bp, Artificial Sequence
  Synthetic Polynucleotide
ggagtacgatcctttgaaaa

SEQ ID NO: 5471 - DNA, 19 bp, Artificial Sequence
  Synthetic Polynucleotide
ctggtgtgggaacaactga

SEQ ID NO: 5472 - DNA, 19 bp, Artificial Sequence
  Synthetic Polynucleotide
gggcggtgaatgagatcca

SEQ ID NO: 5473 - DNA, 19 bp, Artificial Sequence
  Synthetic Polynucleotide
caccttagcttttaggctg

SEQ ID NO: 5474 - DNA, 18 bp, Artificial Sequence
  Synthetic Polynucleotide
tcttttggttgaatctga

SEQ ID NO: 5475 - DNA, 19 bp, Artificial Sequence
  Synthetic Polynucleotide
cgtaaaccttgtattttgc

SEQ ID NO: 5476 - DNA, 18 bp, Artificial Sequence
  Synthetic Polynucleotide
gatgagttgcattactgg

SEQ ID NO: 5477 - DNA, 19 bp, Artificial Sequence
  Synthetic Polynucleotide
gattttctattgtcgctgc

SEQ ID NO: 5478 - DNA, 17 bp, Artificial Sequence
  Synthetic Polynucleotide
cgttagcattgggcgga

SEQ ID NO: 5479 - DNA, 19 bp, Artificial Sequence
  Synthetic Polynucleotide
acatttatgggcagtaact

SEQ ID NO: 5480 - DNA, 20 bp, Artificial Sequence
  Synthetic Polynucleotide
tcaactagcacctattgcat

SEQ ID NO: 5481 - DNA, 18 bp, Artificial Sequence
  Synthetic Polynucleotide
ggactttgcgggagtagt

SEQ ID NO: 5482 - DNA, 18 bp, Artificial Sequence
  Synthetic Polynucleotide
cctagggatactgacgaa

SEQ ID NO: 5483 - DNA, 18 bp, Artificial Sequence
  Synthetic Polynucleotide
gggcacgtaagagaaggg

SEQ ID NO: 5484 - DNA, 19 bp, Artificial Sequence
  Synthetic Polynucleotide
ggtttgctaaagttagagg

SEQ ID NO: 5485 - DNA, 20 bp, Artificial Sequence
  Synthetic Polynucleotide
tgaaattttcgggtctattc

SEQ ID NO: 5486 - DNA, 19 bp, Artificial Sequence
  Synthetic Polynucleotide
gccacttagtcctgaactg

SEQ ID NO: 5487 - DNA, 17 bp, Artificial Sequence
  Synthetic Polynucleotide
tccagaatggctgtcct

SEQ ID NO: 5488 - DNA, 20 bp, Artificial Sequence
  Synthetic Polynucleotide
gtacatggaaaactacagac

SEQ ID NO: 5489 - DNA, 17 bp, Artificial Sequence
  Synthetic Polynucleotide
acagtcgaatcttgggt

SEQ ID NO: 5490 - DNA, 19 bp, Artificial Sequence
  Synthetic Polynucleotide
tgaagagaatttggacgaa

SEQ ID NO: 5491 - DNA, 19 bp, Artificial Sequence
  Synthetic Polynucleotide
tagattttgatcctctgcg

SEQ ID NO: 5492 - DNA, 20 bp, Artificial Sequence
  Synthetic Polynucleotide
gattgcacttgagaaaggga

SEQ ID NO: 5493 - DNA, 18 bp, Artificial Sequence
  Synthetic Polynucleotide
ctggggtaaatggtttcg

SEQ ID NO: 5494 - DNA, 19 bp, Artificial Sequence
  Synthetic Polynucleotide
gacgagtcctactagatga

SEQ ID NO: 5495 - DNA, 20 bp, Artificial Sequence
  Synthetic Polynucleotide
gtttcttaggctctttgatc

SEQ ID NO: 5496 - DNA, 20 bp, Artificial Sequence
  Synthetic Polynucleotide
tggagaatgagaacctatcc

SEQ ID NO: 5497 - DNA, 18 bp, Artificial Sequence
  Synthetic Polynucleotide
ggaagtgggtggtaggag

SEQ ID NO: 5498 - DNA, 19 bp, Artificial Sequence
  Synthetic Polynucleotide
cccgtggcattaaaataac

SEQ ID NO: 5499 - DNA, 19 bp, Artificial Sequence
  Synthetic Polynucleotide
tctttccaaatcacgattg

SEQ ID NO: 5500 - DNA, 19 bp, Artificial Sequence
  Synthetic Polynucleotide
aagagcctattgatgaagt

SEQ ID NO: 5501 - DNA, 18 bp, Artificial Sequence
  Synthetic Polynucleotide
gggtgatgtttccatagc

SEQ ID NO: 5502 - DNA, 20 bp, Artificial Sequence
  Synthetic Polynucleotide
tgagcaacatgacagcacca

SEQ ID NO: 5503 - DNA, 17 bp, Artificial Sequence
  Synthetic Polynucleotide
tagtccccacttcatta

SEQ ID NO: 5504 - DNA, 19 bp, Artificial Sequence
  Synthetic Polynucleotide
tttcgcttacaatgaggaa

SEQ ID NO: 5505 - DNA, 19 bp, Artificial Sequence
  Synthetic Polynucleotide
ctgagggcgtacactgttt

SEQ ID NO: 5506 - DNA, 18 bp, Artificial Sequence
  Synthetic Polynucleotide
aagaggcactaaaagtga

SEQ ID NO: 5507 - DNA, 17 bp, Artificial Sequence
  Synthetic Polynucleotide
ggcgtgctgtttcactg

SEQ ID NO: 5508 - DNA, 18 bp, Artificial Sequence
  Synthetic Polynucleotide
agaaggaaagtccatcct

SEQ ID NO: 5509 - DNA, 17 bp, Artificial Sequence
  Synthetic Polynucleotide
atcttcctctgcaatcc

SEQ ID NO: 5510 - DNA, 17 bp, Artificial Sequence
  Synthetic Polynucleotide
ccctgtgcgtgaatcca

SEQ ID NO: 5511 - DNA, 17 bp, Artificial Sequence
  Synthetic Polynucleotide
cacatttccatccgaac

SEQ ID NO: 5512 - DNA, 17 bp, Artificial Sequence
  Synthetic Polynucleotide
ttgccagtccctttggg

SEQ ID NO: 5513 - DNA, 17 bp, Artificial Sequence
  Synthetic Polynucleotide
cacgaagcgatgacaca

SEQ ID NO: 5514 - DNA, 17 bp, Artificial Sequence
  Synthetic Polynucleotide
gactaccacttcgttgc

SEQ ID NO: 5515 - DNA, 20 bp, Artificial Sequence
  Synthetic Polynucleotide
aagccagttcaaattaaagg

SEQ ID NO: 5516 - DNA, 18 bp, Artificial Sequence
  Synthetic Polynucleotide
ccctgtgcgtgaatccat

SEQ ID NO: 5517 - DNA, 17 bp, Artificial Sequence
  Synthetic Polynucleotide
ttccatccgaacattca

SEQ ID NO: 5518 - DNA, 17 bp, Artificial Sequence
  Synthetic Polynucleotide
tcatcaatgacgttgta

SEQ ID NO: 5519 - DNA, 19 bp, Artificial Sequence
  Synthetic Polynucleotide
atttccatccaaacattca

SEQ ID NO: 5520 - DNA, 20 bp, Artificial Sequence
  Synthetic Polynucleotide
atgagtacatgccatataca

SEQ ID NO: 5521 - DNA, 18 bp, Artificial Sequence
  Synthetic Polynucleotide
gctactgtgaagaacgat

SEQ ID NO: 5522 - DNA, 19 bp, Artificial Sequence
  Synthetic Polynucleotide
tcatcaatgacgttatacc

SEQ ID NO: 5523 - DNA, 17 bp, Artificial Sequence
  Synthetic Polynucleotide
tgaacttccaagtctgg

SEQ ID NO: 5524 - DNA, 17 bp, Artificial Sequence
  Synthetic Polynucleotide
tctaaccctgtgtatgc

SEQ ID NO: 5525 - DNA, 20 bp, Artificial Sequence
  Synthetic Polynucleotide
tctcagttagttaatcctcc

SEQ ID NO: 5526 - DNA, 18 bp, Artificial Sequence
  Synthetic Polynucleotide
gtggagatctatgttgca

SEQ ID NO: 5527 - DNA, 18 bp, Artificial Sequence
  Synthetic Polynucleotide
tatcagctttctcatgac

SEQ ID NO: 5528 - DNA, 19 bp, Artificial Sequence
  Synthetic Polynucleotide
agatctatgttgcatctga

SEQ ID NO: 5529 - DNA, 19 bp, Artificial Sequence
  Synthetic Polynucleotide
atcccctctatttcaagat

SEQ ID NO: 5530 - DNA, 17 bp, Artificial Sequence
  Synthetic Polynucleotide
aagcccaggatctatcg

SEQ ID NO: 5531 - DNA, 18 bp, Artificial Sequence
  Synthetic Polynucleotide
tccgtccatcagtaacaa

SEQ ID NO: 5532 - DNA, 20 bp, Artificial Sequence
  Synthetic Polynucleotide
gccactgacatctttacgat

SEQ ID NO: 5533 - DNA, 18 bp, Artificial Sequence
  Synthetic Polynucleotide
attcccactatcttcctc

SEQ ID NO: 5534 - DNA, 18 bp, Artificial Sequence
  Synthetic Polynucleotide
aacatttgtgaatcccca

SEQ ID NO: 5535 - DNA, 18 bp, Artificial Sequence
  Synthetic Polynucleotide
aaagagttgcgaatacag

SEQ ID NO: 5536 - DNA, 19 bp, Artificial Sequence
  Synthetic Polynucleotide
gaaataatggagatcgacg

SEQ ID NO: 5537 - DNA, 19 bp, Artificial Sequence
  Synthetic Polynucleotide
ctcctcctcatccaaccgt

SEQ ID NO: 5538 - DNA, 20 bp, Artificial Sequence
  Synthetic Polynucleotide
tattttgccagtaattatga

SEQ ID NO: 5539 - DNA, 17 bp, Artificial Sequence
  Synthetic Polynucleotide
cctgtaaatgcaactgg

SEQ ID NO: 5540 - DNA, 19 bp, Artificial Sequence
  Synthetic Polynucleotide
gaagaggagtagtagtgta

SEQ ID NO: 5541 - DNA, 17 bp, Artificial Sequence
  Synthetic Polynucleotide
atcgtgctttgcaatcc

SEQ ID NO: 5542 - DNA, 17 bp, Artificial Sequence
  Synthetic Polynucleotide
cccctgtgcgtgaatcc

SEQ ID NO: 5543 - DNA, 17 bp, Artificial Sequence
  Synthetic Polynucleotide
tggtacaacgtcattga

SEQ ID NO: 5544 - DNA, 17 bp, Artificial Sequence
  Synthetic Polynucleotide
ctgaacttcgacagccc

SEQ ID NO: 5545 - DNA, 19 bp, Artificial Sequence
  Synthetic Polynucleotide
cgcggccttttagatataa

SEQ ID NO: 5546 - DNA, 20 bp, Artificial Sequence
  Synthetic Polynucleotide
acgtggttttccatacttta

SEQ ID NO: 5547 - DNA, 18 bp, Artificial Sequence
  Synthetic Polynucleotide
tctttctctctctaccac

SEQ ID NO: 5548 - DNA, 18 bp, Artificial Sequence
  Synthetic Polynucleotide
cgttaaatgggacctggt

SEQ ID NO: 5549 - DNA, 17 bp, Artificial Sequence
  Synthetic Polynucleotide
tcaaagggaagctgaaa

SEQ ID NO: 5550 - DNA, 18 bp, Artificial Sequence
  Synthetic Polynucleotide
aggcgttttaattgttgg

SEQ ID NO: 5551 - DNA, 20 bp, Artificial Sequence
  Synthetic Polynucleotide
agttagcaaatcctccaaat

SEQ ID NO: 5552 - DNA, 19 bp, Artificial Sequence
  Synthetic Polynucleotide
tagtggagatctatgttgc

SEQ ID NO: 5553 - DNA, 17 bp, Artificial Sequence
  Synthetic Polynucleotide
ctctacatctgcggacc

SEQ ID NO: 5554 - DNA, 18 bp, Artificial Sequence
  Synthetic Polynucleotide
aaatcagactggcaacct

SEQ ID NO: 5555 - DNA, 20 bp, Artificial Sequence
  Synthetic Polynucleotide
gcattatgaagaattcgatc

SEQ ID NO: 5556 - DNA, 18 bp, Artificial Sequence
  Synthetic Polynucleotide
tttgagtttgtaacccca

SEQ ID NO: 5557 - DNA, 17 bp, Artificial Sequence
  Synthetic Polynucleotide
ggcgttcttgcttatgt

SEQ ID NO: 5558 - DNA, 17 bp, Artificial Sequence
  Synthetic Polynucleotide
gtccaatcatttcgctc

SEQ ID NO: 5559 - DNA, 17 bp, Artificial Sequence
  Synthetic Polynucleotide
ggaaccttccaaatcga

SEQ ID NO: 5560 - DNA, 17 bp, Artificial Sequence
  Synthetic Polynucleotide
cacatggttttacccgt

SEQ ID NO: 5561 - DNA, 17 bp, Artificial Sequence
  Synthetic Polynucleotide
cgtggacttttccgatc

SEQ ID NO: 5562 - DNA, 19 bp, Artificial Sequence
  Synthetic Polynucleotide
ctgatgaacattcgtatcg

SEQ ID NO: 5563 - DNA, 17 bp, Artificial Sequence
  Synthetic Polynucleotide
aagactggtcaaatccg

SEQ ID NO: 5564 - DNA, 17 bp, Artificial Sequence
  Synthetic Polynucleotide
gcgttttaagggaactc

SEQ ID NO: 5565 - DNA, 18 bp, Artificial Sequence
  Synthetic Polynucleotide
atgcttggtataacgtca

SEQ ID NO: 5566 - DNA, 20 bp, Artificial Sequence
  Synthetic Polynucleotide
ccacctttaatttgaattgg

SEQ ID NO: 5567 - DNA, 19 bp, Artificial Sequence
  Synthetic Polynucleotide
gtgctcaatcgcttattaa

SEQ ID NO: 5568 - DNA, 18 bp, Artificial Sequence
  Synthetic Polynucleotide
gtggttaatggagtgttc

SEQ ID NO: 5569 - DNA, 18 bp, Artificial Sequence
  Synthetic Polynucleotide
cgacaagagaatgacgga

SEQ ID NO: 5570 - DNA, 17 bp, Artificial Sequence
  Synthetic Polynucleotide
catctgatgggcttcct

SEQ ID NO: 5571 - DNA, 17 bp, Artificial Sequence
  Synthetic Polynucleotide
tcccctgtatttcaaga

SEQ ID NO: 5572 - DNA, 18 bp, Artificial Sequence
  Synthetic Polynucleotide
aagatatggatggacgag

SEQ ID NO: 5573 - DNA, 20 bp, Artificial Sequence
  Synthetic Polynucleotide
aactaaaacggtagaacaat

SEQ ID NO: 5574 - DNA, 17 bp, Artificial Sequence
  Synthetic Polynucleotide
ttttgaacggctgagat

SEQ ID NO: 5575 - DNA, 19 bp, Artificial Sequence
  Synthetic Polynucleotide
acacgacatgagattgacg

SEQ ID NO: 5576 - DNA, 20 bp, Artificial Sequence
  Synthetic Polynucleotide
taagcgatgtatcctcacaa

SEQ ID NO: 5577 - DNA, 18 bp, Artificial Sequence
  Synthetic Polynucleotide
ttacgagaatgccatttg

SEQ ID NO: 5578 - DNA, 17 bp, Artificial Sequence
  Synthetic Polynucleotide
tgatgagttcccctgtg

SEQ ID NO: 5579 - DNA, 19 bp, Artificial Sequence
  Synthetic Polynucleotide
tactcacccaagaaggtct

SEQ ID NO: 5580 - DNA, 18 bp, Artificial Sequence
  Synthetic Polynucleotide
aagatatggatggacgaa

SEQ ID NO: 5581 - DNA, 20 bp, Artificial Sequence
  Synthetic Polynucleotide
agtgcaaagagtgccaacaa

SEQ ID NO: 5582 - DNA, 19 bp, Artificial Sequence
  Synthetic Polynucleotide
gatgggctgtagctgacac

SEQ ID NO: 5583 - DNA, 20 bp, Artificial Sequence
  Synthetic Polynucleotide
cgtgatgaatatcaactgtc

SEQ ID NO: 5584 - DNA, 17 bp, Artificial Sequence
  Synthetic Polynucleotide
tcaatgacgcaatgatc

SEQ ID NO: 5585 - DNA, 19 bp, Artificial Sequence
  Synthetic Polynucleotide
gaatgacagacaacgaatc

SEQ ID NO: 5586 - DNA, 18 bp, Artificial Sequence
  Synthetic Polynucleotide
gggtcctctgatgaacat

SEQ ID NO: 5587 - DNA, 19 bp, Artificial Sequence
  Synthetic Polynucleotide
gcaacatagatctccacta

SEQ ID NO: 5588 - DNA, 19 bp, Artificial Sequence
  Synthetic Polynucleotide
ccgatgctatgtctaaggc

SEQ ID NO: 5589 - DNA, 19 bp, Artificial Sequence
  Synthetic Polynucleotide
gttgcaaatccctttaatg

SEQ ID NO: 5590 - DNA, 19 bp, Artificial Sequence
  Synthetic Polynucleotide
aaaacgccttgttaattta

SEQ ID NO: 5591 - DNA, 19 bp, Artificial Sequence
  Synthetic Polynucleotide
gctgtatgaaaattgacca

SEQ ID NO: 5592 - DNA, 19 bp, Artificial Sequence
  Synthetic Polynucleotide
ggacaacttcaatttccct

SEQ ID NO: 5593 - DNA, 20 bp, Artificial Sequence
  Synthetic Polynucleotide
ctcatacctccacccaattc

SEQ ID NO: 5594 - DNA, 20 bp, Artificial Sequence
  Synthetic Polynucleotide
cctttaatttgaactggctt

SEQ ID NO: 5595 - DNA, 17 bp, Artificial Sequence
  Synthetic Polynucleotide
atgcatgaagatcgacc

SEQ ID NO: 5596 - DNA, 20 bp, Artificial Sequence
  Synthetic Polynucleotide
tccaacaacacttctatccc

SEQ ID NO: 5597 - DNA, 17 bp, Artificial Sequence
  Synthetic Polynucleotide
gcaccaacagtgaagat

SEQ ID NO: 5598 - DNA, 20 bp, Artificial Sequence
  Synthetic Polynucleotide
ataatataagcaagaacgcc

SEQ ID NO: 5599 - DNA, 18 bp, Artificial Sequence
  Synthetic Polynucleotide
agctgtctagggatagag

SEQ ID NO: 5600 - DNA, 17 bp, Artificial Sequence
  Synthetic Polynucleotide
ttccgtcttggtgagtc

SEQ ID NO: 5601 - DNA, 17 bp, Artificial Sequence
  Synthetic Polynucleotide
cggcaaatgggagagaa

SEQ ID NO: 5602 - DNA, 18 bp, Artificial Sequence
  Synthetic Polynucleotide
gttgatcgtaaaccacat

SEQ ID NO: 5603 - DNA, 20 bp, Artificial Sequence
  Synthetic Polynucleotide
ctgttcaaatcatgggcaaa

SEQ ID NO: 5604 - DNA, 20 bp, Artificial Sequence
  Synthetic Polynucleotide
acttgggagaagtggggaaa

SEQ ID NO: 5605 - DNA, 20 bp, Artificial Sequence
  Synthetic Polynucleotide
tgttcacttttgtaggatgc

SEQ ID NO: 5606 - DNA, 19 bp, Artificial Sequence
  Synthetic Polynucleotide
atattccggctattttggc

SEQ ID NO: 5607 - DNA, 20 bp, Artificial Sequence
  Synthetic Polynucleotide
cattggaatgttataaggca

SEQ ID NO: 5608 - DNA, 19 bp, Artificial Sequence
  Synthetic Polynucleotide
aagggaacgtcaaagttac

SEQ ID NO: 5609 - DNA, 20 bp, Artificial Sequence
  Synthetic Polynucleotide
tttgtgttaatgaggctata

SEQ ID NO: 5610 - DNA, 19 bp, Artificial Sequence
  Synthetic Polynucleotide
cgcaatcttaaccgttgaa

SEQ ID NO: 5611 - DNA, 17 bp, Artificial Sequence
  Synthetic Polynucleotide
agacttttggagccaga

SEQ ID NO: 5612 - DNA, 20 bp, Artificial Sequence
  Synthetic Polynucleotide
tgatgtagaggaaaggaaat

SEQ ID NO: 5613 - DNA, 17 bp, Artificial Sequence
  Synthetic Polynucleotide
aagcacgtattgacctc

SEQ ID NO: 5614 - DNA, 17 bp, Artificial Sequence
  Synthetic Polynucleotide
acgctattccgaaggaa

SEQ ID NO: 5615 - DNA, 20 bp, Artificial Sequence
  Synthetic Polynucleotide
gtctttatttgggaggtgcg

SEQ ID NO: 5616 - DNA, 19 bp, Artificial Sequence
  Synthetic Polynucleotide
catcactcatagagttggt

SEQ ID NO: 5617 - DNA, 18 bp, Artificial Sequence
  Synthetic Polynucleotide
tggaaccaggtaactacc

SEQ ID NO: 5618 - DNA, 17 bp, Artificial Sequence
  Synthetic Polynucleotide
cgaagtggggaaacact

SEQ ID NO: 5619 - DNA, 20 bp, Artificial Sequence
  Synthetic Polynucleotide
caggggcaacttcatcatat

SEQ ID NO: 5620 - DNA, 20 bp, Artificial Sequence
  Synthetic Polynucleotide
cccttaagaaatgaccagtc

SEQ ID NO: 5621 - DNA, 20 bp, Artificial Sequence
  Synthetic Polynucleotide
tcaacagacaattttcttgt

SEQ ID NO: 5622 - DNA, 17 bp, Artificial Sequence
  Synthetic Polynucleotide
tgcgttgggaggattta

SEQ ID NO: 5623 - DNA, 18 bp, Artificial Sequence
  Synthetic Polynucleotide
agaatgcagaattcgtct

SEQ ID NO: 5624 - DNA, 20 bp, Artificial Sequence
  Synthetic Polynucleotide
ttgttgacactaataatgcc

SEQ ID NO: 5625 - DNA, 18 bp, Artificial Sequence
  Synthetic Polynucleotide
cttgttggaaacagttga

SEQ ID NO: 5626 - DNA, 20 bp, Artificial Sequence
  Synthetic Polynucleotide
ctgcgtagctgaagaacctt

SEQ ID NO: 5627 - DNA, 19 bp, Artificial Sequence
  Synthetic Polynucleotide
aacatcttagaaatcgtcg

SEQ ID NO: 5628 - DNA, 20 bp, Artificial Sequence
  Synthetic Polynucleotide
actatatggaaggatactgg

SEQ ID NO: 5629 - DNA, 20 bp, Artificial Sequence
  Synthetic Polynucleotide
tcagaggacatctcattgca

SEQ ID NO: 5630 - DNA, 17 bp, Artificial Sequence
  Synthetic Polynucleotide
tccacatgggagaagtc

SEQ ID NO: 5631 - DNA, 18 bp, Artificial Sequence
  Synthetic Polynucleotide
tgttgagtcgcacaggga

SEQ ID NO: 5632 - DNA, 20 bp, Artificial Sequence
  Synthetic Polynucleotide
cgtgcagcatctgtaattta

SEQ ID NO: 5633 - DNA, 18 bp, Artificial Sequence
  Synthetic Polynucleotide
acaaagggttacaaggag

SEQ ID NO: 5634 - DNA, 19 bp, Artificial Sequence
  Synthetic Polynucleotide
catggtacactgacaggtc

SEQ ID NO: 5635 - DNA, 17 bp, Artificial Sequence
  Synthetic Polynucleotide
ccaactaccgccccaac

SEQ ID NO: 5636 - DNA, 19 bp, Artificial Sequence
  Synthetic Polynucleotide
ctatccgtagtctttaccc

SEQ ID NO: 5637 - DNA, 19 bp, Artificial Sequence
  Synthetic Polynucleotide
ataatgtccaccttgtcgt

SEQ ID NO: 5638 - DNA, 19 bp, Artificial Sequence
  Synthetic Polynucleotide
agatgtcctaaatctccta

SEQ ID NO: 5639 - DNA, 17 bp, Artificial Sequence
  Synthetic Polynucleotide
tttatgcctacagcctc

SEQ ID NO: 5640 - DNA, 17 bp, Artificial Sequence
  Synthetic Polynucleotide
gtggtggacttctctca

SEQ ID NO: 5641 - DNA, 17 bp, Artificial Sequence
  Synthetic Polynucleotide
cgagggagttcttcttc

SEQ ID NO: 5642 - DNA, 17 bp, Artificial Sequence
  Synthetic Polynucleotide
ggagtgtggattcgcac

SEQ ID NO: 5643 - DNA, 17 bp, Artificial Sequence
  Synthetic Polynucleotide
ggccagctagtattccc

SEQ ID NO: 5644 - DNA, 18 bp, Artificial Sequence
  Synthetic Polynucleotide
ccattgaagcaatcacta

SEQ ID NO: 5645 - DNA, 18 bp, Artificial Sequence
  Synthetic Polynucleotide
tatgcctacagcctccta

SEQ ID NO: 5646 - DNA, 20 bp, Artificial Sequence
  Synthetic Polynucleotide
tgcctcatcttcttgttggt

SEQ ID NO: 5647 - DNA, 17 bp, Artificial Sequence
  Synthetic Polynucleotide
taaagggacagcaacca

SEQ ID NO: 5648 - DNA, 18 bp, Artificial Sequence
  Synthetic Polynucleotide
accctgtacaatcagcgg

SEQ ID NO: 5649 - DNA, 17 bp, Artificial Sequence
  Synthetic Polynucleotide
tgagtgccgtatggtga

SEQ ID NO: 5650 - DNA, 19 bp, Artificial Sequence
  Synthetic Polynucleotide
tctgcctaatcatctcttg

SEQ ID NO: 5651 - DNA, 17 bp, Artificial Sequence
  Synthetic Polynucleotide
gccgacgaaatcaattc

SEQ ID NO: 5652 - DNA, 17 bp, Artificial Sequence
  Synthetic Polynucleotide
gtggtttctggggtgac

SEQ ID NO: 5653 - DNA, 17 bp, Artificial Sequence
  Synthetic Polynucleotide
tggggcagatcgacgac

SEQ ID NO: 5654 - DNA, 18 bp, Artificial Sequence
  Synthetic Polynucleotide
tgcttctgcctatgctgc

SEQ ID NO: 5655 - DNA, 19 bp, Artificial Sequence
  Synthetic Polynucleotide
cctattaatggagcgtgga

SEQ ID NO: 5656 - DNA, 18 bp, Artificial Sequence
  Synthetic Polynucleotide
gccagggtaagaatggac

SEQ ID NO: 5657 - DNA, 19 bp, Artificial Sequence
  Synthetic Polynucleotide
gttggttgtcatagtcctg

SEQ ID NO: 5658 - DNA, 18 bp, Artificial Sequence
  Synthetic Polynucleotide
tttcctgcgaaagttaac

SEQ ID NO: 5659 - DNA, 18 bp, Artificial Sequence
  Synthetic Polynucleotide
ggaatgtttccgttgata

SEQ ID NO: 5660 - DNA, 17 bp, Artificial Sequence
  Synthetic Polynucleotide
tttgaacgaggcactgc

SEQ ID NO: 5661 - DNA, 17 bp, Artificial Sequence
  Synthetic Polynucleotide
agggttagggttagggt

SEQ ID NO: 5662 - DNA, 17 bp, Artificial Sequence
  Synthetic Polynucleotide
ccctaaccctaacccta

SEQ ID NO: 5663 - DNA, 18 bp, Artificial Sequence
  Synthetic Polynucleotide
ggcgttgtaaaagtagta

SEQ ID NO: 5664 - DNA, 18 bp, Artificial Sequence
  Synthetic Polynucleotide
cgacaaggtcaagtccct

SEQ ID NO: 5665 - DNA, 18 bp, Artificial Sequence
  Synthetic Polynucleotide
gggctcatgctagagtat

SEQ ID NO: 5666 - DNA, 17 bp, Artificial Sequence
  Synthetic Polynucleotide
tcatccaggcccacaac

SEQ ID NO: 5667 - DNA, 17 bp, Artificial Sequence
  Synthetic Polynucleotide
ccacacctacgagtccc

SEQ ID NO: 5668 - DNA, 20 bp, Artificial Sequence
  Synthetic Polynucleotide
gttccttagtgacatccacg

SEQ ID NO: 5669 - DNA, 20 bp, Artificial Sequence
  Synthetic Polynucleotide
atcaatgactttactgaagc

SEQ ID NO: 5670 - DNA, 18 bp, Artificial Sequence
  Synthetic Polynucleotide
ccaagatcaggatatcgg

SEQ ID NO: 5671 - DNA, 17 bp, Artificial Sequence
  Synthetic Polynucleotide
tcacggtctccgctatg

SEQ ID NO: 5672 - DNA, 18 bp, Artificial Sequence
  Synthetic Polynucleotide
tcgtccccatagacatgt

SEQ ID NO: 5673 - DNA, 17 bp, Artificial Sequence
  Synthetic Polynucleotide
gctcctgctaaaactgt

SEQ ID NO: 5674 - DNA, 17 bp, Artificial Sequence
  Synthetic Polynucleotide
ctcctcctcctcctcct

SEQ ID NO: 5675 - DNA, 17 bp, Artificial Sequence
  Synthetic Polynucleotide
ttgcagaagttgctcca

SEQ ID NO: 5676 - DNA, 17 bp, Artificial Sequence
  Synthetic Polynucleotide
agttctgccagcaccag

SEQ ID NO: 5677 - DNA, 17 bp, Artificial Sequence
  Synthetic Polynucleotide
agcagctccccatcaaa

SEQ ID NO: 5678 - DNA, 18 bp, Artificial Sequence
  Synthetic Polynucleotide
ttttgcgaccccatgtgc

SEQ ID NO: 5679 - DNA, 20 bp, Artificial Sequence
  Synthetic Polynucleotide
ttccatttgcattctacgtt

SEQ ID NO: 5680 - DNA, 19 bp, Artificial Sequence
  Synthetic Polynucleotide
tctgtcatcatgtaccaaa

SEQ ID NO: 5681 - DNA, 17 bp, Artificial Sequence
  Synthetic Polynucleotide
agtcgtcgatctcgggc

SEQ ID NO: 5682 - DNA, 18 bp, Artificial Sequence
  Synthetic Polynucleotide
cgaagctcaggttgtacc

SEQ ID NO: 5683 - DNA, 18 bp, Artificial Sequence
  Synthetic Polynucleotide
gccgctcatgttgtactg

SEQ ID NO: 5684 - DNA, 17 bp, Artificial Sequence
  Synthetic Polynucleotide
ttctacatcatcgaggc

SEQ ID NO: 5685 - DNA, 17 bp, Artificial Sequence
  Synthetic Polynucleotide
tcctcttcctcctcttc

SEQ ID NO: 5686 - DNA, 19 bp, Artificial Sequence
  Synthetic Polynucleotide
tgtaccattttcatcctct

SEQ ID NO: 5687 - DNA, 20 bp, Artificial Sequence
  Synthetic Polynucleotide
agtcttttcatttccagaca

SEQ ID NO: 5688 - DNA, 20 bp, Artificial Sequence
  Synthetic Polynucleotide
tcaagagtagagttccagtt

SEQ ID NO: 5689 - DNA, 18 bp, Artificial Sequence
  Synthetic Polynucleotide
tgttcgctatgggaaacc

SEQ ID NO: 5690 - DNA, 19 bp, Artificial Sequence
  Synthetic Polynucleotide
cgtgtttgcttttggtgtg

SEQ ID NO: 5691 - DNA, 20 bp, Artificial Sequence
  Synthetic Polynucleotide
ctacgtctatgcaaccgaag

SEQ ID NO: 5692 - DNA, 17 bp, Artificial Sequence
  Synthetic Polynucleotide
cgctctcttcctcacgc

SEQ ID NO: 5693 - DNA, 18 bp, Artificial Sequence
  Synthetic Polynucleotide
aatgaggtcacatggtac

SEQ ID NO: 5694 - DNA, 17 bp, Artificial Sequence
  Synthetic Polynucleotide
actttcgcacccttgag

SEQ ID NO: 5695 - DNA, 19 bp, Artificial Sequence
  Synthetic Polynucleotide
tccgtacccttatggtcat

SEQ ID NO: 5696 - DNA, 18 bp, Artificial Sequence
  Synthetic Polynucleotide
gcgccttctgcaactcta

SEQ ID NO: 5697 - DNA, 18 bp, Artificial Sequence
  Synthetic Polynucleotide
ttcaatctcgtaccgatt

SEQ ID NO: 5698 - DNA, 19 bp, Artificial Sequence
  Synthetic Polynucleotide
tgtaaaatctgcccgagcc

SEQ ID NO: 5699 - DNA, 17 bp, Artificial Sequence
  Synthetic Polynucleotide
cggacaaataagacccc

SEQ ID NO: 5700 - DNA, 19 bp, Artificial Sequence
  Synthetic Polynucleotide
ctacttctccaagagtgtt

SEQ ID NO: 5701 - DNA, 18 bp, Artificial Sequence
  Synthetic Polynucleotide
cgctgtctgcctatgcat

SEQ ID NO: 5702 - DNA, 18 bp, Artificial Sequence
  Synthetic Polynucleotide
tgctggattctgtactcg

SEQ ID NO: 5703 - DNA, 19 bp, Artificial Sequence
  Synthetic Polynucleotide
ctctgtcttgatgcttttg

SEQ ID NO: 5704 - DNA, 17 bp, Artificial Sequence
  Synthetic Polynucleotide
acccgctacatacaacg

SEQ ID NO: 5705 - DNA, 17 bp, Artificial Sequence
  Synthetic Polynucleotide
aacatcatcaacccctc

SEQ ID NO: 5706 - DNA, 17 bp, Artificial Sequence
  Synthetic Polynucleotide
cgccccgctcaattcat

SEQ ID NO: 5707 - DNA, 17 bp, Artificial Sequence
  Synthetic Polynucleotide
tgtagacgatcctacgt

SEQ ID NO: 5708 - DNA, 17 bp, Artificial Sequence
  Synthetic Polynucleotide
ttggtggtaggcgtgta

SEQ ID NO: 5709 - DNA, 17 bp, Artificial Sequence
  Synthetic Polynucleotide
ggtctctggacatccat

SEQ ID NO: 5710 - DNA, 19 bp, Artificial Sequence
  Synthetic Polynucleotide
caactggatttgccccaaa

SEQ ID NO: 5711 - DNA, 17 bp, Artificial Sequence
  Synthetic Polynucleotide
aagagaggtggaccaaa

SEQ ID NO: 5712 - DNA, 20 bp, Artificial Sequence
  Synthetic Polynucleotide
gagccatgcgttcataaagg

SEQ ID NO: 5713 - DNA, 19 bp, Artificial Sequence
  Synthetic Polynucleotide
gccattaccttaactccat

SEQ ID NO: 5714 - DNA, 17 bp, Artificial Sequence
  Synthetic Polynucleotide
attcgggatgcttatcc

SEQ ID NO: 5715 - DNA, 20 bp, Artificial Sequence
  Synthetic Polynucleotide
cccgttccgttgatttggaa

SEQ ID NO: 5716 - DNA, 18 bp, Artificial Sequence
  Synthetic Polynucleotide
ttgggtttccagttctac

SEQ ID NO: 5717 - DNA, 20 bp, Artificial Sequence
  Synthetic Polynucleotide
ccagctacaattttatcctg

SEQ ID NO: 5718 - DNA, 20 bp, Artificial Sequence
  Synthetic Polynucleotide
tccgttattattgcgtttcc

SEQ ID NO: 5719 - DNA, 19 bp, Artificial Sequence
  Synthetic Polynucleotide
accgtaagtcgatcagatg

SEQ ID NO: 5720 - DNA, 19 bp, Artificial Sequence
  Synthetic Polynucleotide
gtggctagattacttgctc

SEQ ID NO: 5721 - DNA, 19 bp, Artificial Sequence
  Synthetic Polynucleotide
accaacaccactcgctaat

SEQ ID NO: 5722 - DNA, 20 bp, Artificial Sequence
  Synthetic Polynucleotide
tttgcgttgaaattacaaaa

SEQ ID NO: 5723 - DNA, 17 bp, Artificial Sequence
  Synthetic Polynucleotide
accaccaccagtatcac

SEQ ID NO: 5724 - DNA, 20 bp, Artificial Sequence
  Synthetic Polynucleotide
atgaagaaccttctgaacaa

SEQ ID NO: 5725 - DNA, 18 bp, Artificial Sequence
  Synthetic Polynucleotide
cttgaaccagtccacgat

SEQ ID NO: 5726 - DNA, 18 bp, Artificial Sequence
  Synthetic Polynucleotide
cgtctcgtcatcttgatc

SEQ ID NO: 5727 - DNA, 17 bp, Artificial Sequence
  Synthetic Polynucleotide
cacatcaccatcagcac

SEQ ID NO: 5728 - DNA, 17 bp, Artificial Sequence
  Synthetic Polynucleotide
ctgtacccctaccaagc

SEQ ID NO: 5729 - DNA, 20 bp, Artificial Sequence
  Synthetic Polynucleotide
caggaagtgaagtttgtatc

SEQ ID NO: 5730 - DNA, 18 bp, Artificial Sequence
  Synthetic Polynucleotide
gcgggctttgttaccaat

SEQ ID NO: 5731 - DNA, 18 bp, Artificial Sequence
  Synthetic Polynucleotide
ccgcactcatgctctgct

SEQ ID NO: 5732 - DNA, 20 bp, Artificial Sequence
  Synthetic Polynucleotide
cgcagattcagtcggctatc

SEQ ID NO: 5733 - DNA, 20 bp, Artificial Sequence
  Synthetic Polynucleotide
taattgcttgatacgtttgt

SEQ ID NO: 5734 - DNA, 18 bp, Artificial Sequence
  Synthetic Polynucleotide
caccacaagttacacaaa

SEQ ID NO: 5735 - DNA, 18 bp, Artificial Sequence
  Synthetic Polynucleotide
aaaacctccggctcattt

SEQ ID NO: 5736 - DNA, 20 bp, Artificial Sequence
  Synthetic Polynucleotide
tctcgttattgttgaaattg

SEQ ID NO: 5737 - DNA, 17 bp, Artificial Sequence
  Synthetic Polynucleotide
caggcacaatactctgg

SEQ ID NO: 5738 - DNA, 20 bp, Artificial Sequence
  Synthetic Polynucleotide
aatttcgctatttcttggcc

SEQ ID NO: 5739 - DNA, 18 bp, Artificial Sequence
  Synthetic Polynucleotide
caacaactcctatcagga

SEQ ID NO: 5740 - DNA, 20 bp, Artificial Sequence
  Synthetic Polynucleotide
gggatctccatgattatttt

SEQ ID NO: 5741 - DNA, 19 bp, Artificial Sequence
  Synthetic Polynucleotide
attgcttaggaaaagaaga

SEQ ID NO: 5742 - DNA, 17 bp, Artificial Sequence
  Synthetic Polynucleotide
cgagatgttcctcggcc

SEQ ID NO: 5743 - DNA, 20 bp, Artificial Sequence
  Synthetic Polynucleotide
cgaataggattgtttcatca

SEQ ID NO: 5744 - DNA, 19 bp, Artificial Sequence
  Synthetic Polynucleotide
tagtttccttggacggaac

SEQ ID NO: 5745 - DNA, 19 bp, Artificial Sequence
  Synthetic Polynucleotide
agcgggacgtttggaagtc

SEQ ID NO: 5746 - DNA, 18 bp, Artificial Sequence
  Synthetic Polynucleotide
gataccgcatcatcgagc

SEQ ID NO: 5747 - DNA, 17 bp, Artificial Sequence
  Synthetic Polynucleotide
cgcagagcacctgaaca

SEQ ID NO: 5748 - DNA, 20 bp, Artificial Sequence
  Synthetic Polynucleotide
tgtttgatgtcacaccaatg

SEQ ID NO: 5749 - DNA, 18 bp, Artificial Sequence
  Synthetic Polynucleotide
aaatgctaaggctgaagg

SEQ ID NO: 5750 - DNA, 20 bp, Artificial Sequence
  Synthetic Polynucleotide
gtgaattagccataggagta

SEQ ID NO: 5751 - DNA, 18 bp, Artificial Sequence
  Synthetic Polynucleotide
atagtttgagtccgtgtc

SEQ ID NO: 5752 - DNA, 20 bp, Artificial Sequence
  Synthetic Polynucleotide
accgtgtacaagtccatctt

SEQ ID NO: 5753 - DNA, 18 bp, Artificial Sequence
  Synthetic Polynucleotide
atcacccaagagagctaa

SEQ ID NO: 5754 - DNA, 19 bp, Artificial Sequence
  Synthetic Polynucleotide
aatcaatgccgatacttac

SEQ ID NO: 5755 - DNA, 20 bp, Artificial Sequence
  Synthetic Polynucleotide
ccagtgccaacagtttgaat

SEQ ID NO: 5756 - DNA, 20 bp, Artificial Sequence
  Synthetic Polynucleotide
acgagacgtgaatttaaaat

SEQ ID NO: 5757 - DNA, 20 bp, Artificial Sequence
  Synthetic Polynucleotide
tgcctgaaccaatttatagt

SEQ ID NO: 5758 - DNA, 20 bp, Artificial Sequence
  Synthetic Polynucleotide
ttctccagattccatactta

SEQ ID NO: 5759 - DNA, 18 bp, Artificial Sequence
  Synthetic Polynucleotide
cgctggtggagcaatcaa

SEQ ID NO: 5760 - DNA, 18 bp, Artificial Sequence
  Synthetic Polynucleotide
ttaccactcattggagag

SEQ ID NO: 5761 - DNA, 17 bp, Artificial Sequence
  Synthetic Polynucleotide
aaacaaaccgttgccgt

SEQ ID NO: 5762 - DNA, 17 bp, Artificial Sequence
  Synthetic Polynucleotide
cacaagggttcaagttg

SEQ ID NO: 5763 - DNA, 18 bp, Artificial Sequence
  Synthetic Polynucleotide
gaaagtgtagccattacc

SEQ ID NO: 5764 - DNA, 20 bp, Artificial Sequence
  Synthetic Polynucleotide
acttcaaataaagcagtcac

SEQ ID NO: 5765 - DNA, 17 bp, Artificial Sequence
  Synthetic Polynucleotide
ttgctgtaaagtcgtca

SEQ ID NO: 5766 - DNA, 20 bp, Artificial Sequence
  Synthetic Polynucleotide
aacaaagaagttcaactctt

SEQ ID NO: 5767 - DNA, 19 bp, Artificial Sequence
  Synthetic Polynucleotide
ggcgtatgtagaaaggtgt

SEQ ID NO: 5768 - DNA, 18 bp, Artificial Sequence
  Synthetic Polynucleotide
aacaaatgtccgatccaa

SEQ ID NO: 5769 - DNA, 19 bp, Artificial Sequence
  Synthetic Polynucleotide
agtatgatgaaaaccgcat

SEQ ID NO: 5770 - DNA, 20 bp, Artificial Sequence
  Synthetic Polynucleotide
tgattcacatcacgtcttac

SEQ ID NO: 5771 - DNA, 18 bp, Artificial Sequence
  Synthetic Polynucleotide
accgttactcgtcttgcg

SEQ ID NO: 5772 - DNA, 19 bp, Artificial Sequence
  Synthetic Polynucleotide
ggtcatagacctgactagc

SEQ ID NO: 5773 - DNA, 19 bp, Artificial Sequence
  Synthetic Polynucleotide
ggggtggtagctaatggtg

SEQ ID NO: 5774 - DNA, 20 bp, Artificial Sequence
  Synthetic Polynucleotide
tggatgacatggctggtcta

SEQ ID NO: 5775 - DNA, 18 bp, Artificial Sequence
  Synthetic Polynucleotide
aacggaaagacaatgtga

SEQ ID NO: 5776 - DNA, 20 bp, Artificial Sequence
  Synthetic Polynucleotide
tgacgtattccttttctcct

SEQ ID NO: 5777 - DNA, 17 bp, Artificial Sequence
  Synthetic Polynucleotide
tatactcatggtaggcc

SEQ ID NO: 5778 - DNA, 17 bp, Artificial Sequence
  Synthetic Polynucleotide
atcaactggtagcccgg

SEQ ID NO: 5779 - DNA, 20 bp, Artificial Sequence
  Synthetic Polynucleotide
attttatactcatggtaggc

SEQ ID NO: 5780 - DNA, 19 bp, Artificial Sequence
  Synthetic Polynucleotide
gatgctcgaagacgacatg

SEQ ID NO: 5781 - DNA, 17 bp, Artificial Sequence
  Synthetic Polynucleotide
tgttcccacttaagcgc

SEQ ID NO: 5782 - DNA, 18 bp, Artificial Sequence
  Synthetic Polynucleotide
cgagaagaagatcatgca

SEQ ID NO: 5783 - DNA, 19 bp, Artificial Sequence
  Synthetic Polynucleotide
tcatttcctttcccaacgg

SEQ ID NO: 5784 - DNA, 17 bp, Artificial Sequence
  Synthetic Polynucleotide
tctggttttgaatcccc

SEQ ID NO: 5785 - DNA, 19 bp, Artificial Sequence
  Synthetic Polynucleotide
acaataaagaaggaggcat

SEQ ID NO: 5786 - DNA, 20 bp, Artificial Sequence
  Synthetic Polynucleotide
ccaaataggtagacgaggaa

SEQ ID NO: 5787 - DNA, 17 bp, Artificial Sequence
  Synthetic Polynucleotide
cggattgtacccgtgga

SEQ ID NO: 5788 - DNA, 17 bp, Artificial Sequence
  Synthetic Polynucleotide
gacatggaggtgagaaa

SEQ ID NO: 5789 - DNA, 17 bp, Artificial Sequence
  Synthetic Polynucleotide
gagtattccagagctga

SEQ ID NO: 5790 - DNA, 18 bp, Artificial Sequence
  Synthetic Polynucleotide
tgaactgaaatccctgcg

SEQ ID NO: 5791 - DNA, 17 bp, Artificial Sequence
  Synthetic Polynucleotide
aggaggtggaagaggcc

SEQ ID NO: 5792 - DNA, 19 bp, Artificial Sequence
  Synthetic Polynucleotide
taatcgacaaggtagtctc

SEQ ID NO: 5793 - DNA, 19 bp, Artificial Sequence
  Synthetic Polynucleotide
acatttgcacgaaattcaa

SEQ ID NO: 5794 - DNA, 18 bp, Artificial Sequence
  Synthetic Polynucleotide
ggtctattgtctgcaata

SEQ ID NO: 5795 - DNA, 19 bp, Artificial Sequence
  Synthetic Polynucleotide
ggaatcatggtttgtgacc

SEQ ID NO: 5796 - DNA, 17 bp, Artificial Sequence
  Synthetic Polynucleotide
gtccgaagagaacttcc

SEQ ID NO: 5797 - DNA, 18 bp, Artificial Sequence
  Synthetic Polynucleotide
tcaatgtgaccctcgcca

SEQ ID NO: 5798 - DNA, 19 bp, Artificial Sequence
  Synthetic Polynucleotide
aattggactgattacacca

SEQ ID NO: 5799 - DNA, 17 bp, Artificial Sequence
  Synthetic Polynucleotide
aataagcaatgacggca

SEQ ID NO: 5800 - DNA, 18 bp, Artificial Sequence
  Synthetic Polynucleotide
aatcgaagtggactgctg

SEQ ID NO: 5801 - DNA, 17 bp, Artificial Sequence
  Synthetic Polynucleotide
aaccgcctacataccag

SEQ ID NO: 5802 - DNA, 18 bp, Artificial Sequence
  Synthetic Polynucleotide
ttcctgctcctgttgagt

SEQ ID NO: 5803 - DNA, 17 bp, Artificial Sequence
  Synthetic Polynucleotide
gctcctgaaaagccatt

SEQ ID NO: 5804 - DNA, 18 bp, Artificial Sequence
  Synthetic Polynucleotide
tctcctcaaggaaatctt

SEQ ID NO: 5805 - DNA, 17 bp, Artificial Sequence
  Synthetic Polynucleotide
gccaataccatcagctt

SEQ ID NO: 5806 - DNA, 18 bp, Artificial Sequence
  Synthetic Polynucleotide
gcgacttcacgccagaat

SEQ ID NO: 5807 - DNA, 19 bp, Artificial Sequence
  Synthetic Polynucleotide
ggtaatttgttccgcctct

SEQ ID NO: 5808 - DNA, 19 bp, Artificial Sequence
  Synthetic Polynucleotide
tataagacccataaaagcc

SEQ ID NO: 5809 - DNA, 19 bp, Artificial Sequence
  Synthetic Polynucleotide
tactacctgaaactccacc

SEQ ID NO: 5810 - DNA, 19 bp, Artificial Sequence
  Synthetic Polynucleotide
attggacctgttgatgctg

SEQ ID NO: 5811 - DNA, 18 bp, Artificial Sequence
  Synthetic Polynucleotide
cttcacggttgatttcca

SEQ ID NO: 5812 - DNA, 17 bp, Artificial Sequence
  Synthetic Polynucleotide
gctgaaggtatggctac

SEQ ID NO: 5813 - DNA, 19 bp, Artificial Sequence
  Synthetic Polynucleotide
gataaggtcatcggtcggg

SEQ ID NO: 5814 - DNA, 19 bp, Artificial Sequence
  Synthetic Polynucleotide
gactcctgacaatggcaaa

SEQ ID NO: 5815 - DNA, 17 bp, Artificial Sequence
  Synthetic Polynucleotide
gatcagatcatcctcgg

SEQ ID NO: 5816 - DNA, 20 bp, Artificial Sequence
  Synthetic Polynucleotide
aggactcgatctgaagggca

SEQ ID NO: 5817 - DNA, 18 bp, Artificial Sequence
  Synthetic Polynucleotide
actttccaccagttagca

SEQ ID NO: 5818 - DNA, 20 bp, Artificial Sequence
  Synthetic Polynucleotide
ggttctacagtaatggaaaa

SEQ ID NO: 5819 - DNA, 19 bp, Artificial Sequence
  Synthetic Polynucleotide
gtcggatttgcgtttcttc

SEQ ID NO: 5820 - DNA, 20 bp, Artificial Sequence
  Synthetic Polynucleotide
gcggtgaaaatgtttaaaac

SEQ ID NO: 5821 - DNA, 17 bp, Artificial Sequence
  Synthetic Polynucleotide
aactcttcggtgcctga

SEQ ID NO: 5822 - DNA, 20 bp, Artificial Sequence
  Synthetic Polynucleotide
ctgttcagtgggttcaaaat

SEQ ID NO: 5823 - DNA, 18 bp, Artificial Sequence
  Synthetic Polynucleotide
tccagaattacggcttac

SEQ ID NO: 5824 - DNA, 20 bp, Artificial Sequence
  Synthetic Polynucleotide
aacaatatcctcaatgtacg

SEQ ID NO: 5825 - DNA, 20 bp, Artificial Sequence
  Synthetic Polynucleotide
tcttgttctgctgatacttg

SEQ ID NO: 5826 - DNA, 19 bp, Artificial Sequence
  Synthetic Polynucleotide
actggctgtcgcacatgaa

SEQ ID NO: 5827 - DNA, 18 bp, Artificial Sequence
  Synthetic Polynucleotide
cgacatactcggggaagt

SEQ ID NO: 5828 - DNA, 20 bp, Artificial Sequence
  Synthetic Polynucleotide
tatccaactatcatccacat

SEQ ID NO: 5829 - DNA, 18 bp, Artificial Sequence
  Synthetic Polynucleotide
tcaagacactctgctcaa

SEQ ID NO: 5830 - DNA, 17 bp, Artificial Sequence
  Synthetic Polynucleotide
catacgttacaaggtgc

SEQ ID NO: 5831 - DNA, 18 bp, Artificial Sequence
  Synthetic Polynucleotide
gtatggggtagggtttta

SEQ ID NO: 5832 - DNA, 19 bp, Artificial Sequence
  Synthetic Polynucleotide
tcgctaggctattttgtgt

SEQ ID NO: 5833 - DNA, 18 bp, Artificial Sequence
  Synthetic Polynucleotide
cctcttggcaatacttct

SEQ ID NO: 5834 - DNA, 20 bp, Artificial Sequence
  Synthetic Polynucleotide
ttctcttcttctactttggg

SEQ ID NO: 5835 - DNA, 17 bp, Artificial Sequence
  Synthetic Polynucleotide
ccaaggtttgctctgtt

SEQ ID NO: 5836 - DNA, 19 bp, Artificial Sequence
  Synthetic Polynucleotide
taacctctatgggtatctg

SEQ ID NO: 5837 - DNA, 18 bp, Artificial Sequence
  Synthetic Polynucleotide
ctcgtaggggctgctgat

SEQ ID NO: 5838 - DNA, 17 bp, Artificial Sequence
  Synthetic Polynucleotide
ctcgtccagttcctcac

SEQ ID NO: 5839 - DNA, 20 bp, Artificial Sequence
  Synthetic Polynucleotide
caatgtcaatcatttcgtca

SEQ ID NO: 5840 - DNA, 19 bp, Artificial Sequence
  Synthetic Polynucleotide
tgggttaaagacatggcaa

SEQ ID NO: 5841 - DNA, 19 bp, Artificial Sequence
  Synthetic Polynucleotide
gttaaacagacgacgaacg

SEQ ID NO: 5842 - DNA, 17 bp, Artificial Sequence
  Synthetic Polynucleotide
ctgctgatattgctggt

SEQ ID NO: 5843 - DNA, 20 bp, Artificial Sequence
  Synthetic Polynucleotide
atgctcgtgatattcatcaa

SEQ ID NO: 5844 - DNA, 17 bp, Artificial Sequence
  Synthetic Polynucleotide
acagagaaacaggcgtg

SEQ ID NO: 5845 - DNA, 17 bp, Artificial Sequence
  Synthetic Polynucleotide
gcaggcattgttggcgt

SEQ ID NO: 5846 - DNA, 17 bp, Artificial Sequence
  Synthetic Polynucleotide
ttcaggaaaccgaacgt

SEQ ID NO: 5847 - DNA, 20 bp, Artificial Sequence
  Synthetic Polynucleotide
tcagatagactgtgggtatc

SEQ ID NO: 5848 - DNA, 20 bp, Artificial Sequence
  Synthetic Polynucleotide
acgaaaggggatagctactc

SEQ ID NO: 5849 - DNA, 17 bp, Artificial Sequence
  Synthetic Polynucleotide
acagtggtcgcagtaca

SEQ ID NO: 5850 - DNA, 20 bp, Artificial Sequence
  Synthetic Polynucleotide
ctctacctggagatggtccg

SEQ ID NO: 5851 - DNA, 19 bp, Artificial Sequence
  Synthetic Polynucleotide
agagaacagggtggttagc

SEQ ID NO: 5852 - DNA, 18 bp, Artificial Sequence
  Synthetic Polynucleotide
tgtagtcacttacatgga

SEQ ID NO: 5853 - DNA, 18 bp, Artificial Sequence
  Synthetic Polynucleotide
ttggggcatatatagtcc

SEQ ID NO: 5854 - DNA, 19 bp, Artificial Sequence
  Synthetic Polynucleotide
ctggaagaaaatcgctgag

SEQ ID NO: 5855 - DNA, 20 bp, Artificial Sequence
  Synthetic Polynucleotide
cacttggaagggatgcaatt

SEQ ID NO: 5856 - DNA, 18 bp, Artificial Sequence
  Synthetic Polynucleotide
ttgaatgttggggtgcta

SEQ ID NO: 5857 - DNA, 19 bp, Artificial Sequence
  Synthetic Polynucleotide
cgctgattaccgtaccgtg

SEQ ID NO: 5858 - DNA, 20 bp, Artificial Sequence
  Synthetic Polynucleotide
cgtaccgaaaaggttcccgt

SEQ ID NO: 5859 - DNA, 18 bp, Artificial Sequence
  Synthetic Polynucleotide
ttgctcaaaatgtccgtc

SEQ ID NO: 5860 - DNA, 19 bp, Artificial Sequence
  Synthetic Polynucleotide
cctcataagggtgtggttt

SEQ ID NO: 5861 - DNA, 17 bp, Artificial Sequence
  Synthetic Polynucleotide
tgaggccgtagaagcta

SEQ ID NO: 5862 - DNA, 19 bp, Artificial Sequence
  Synthetic Polynucleotide
ctgtccgattagtgtatcc

SEQ ID NO: 5863 - DNA, 18 bp, Artificial Sequence
  Synthetic Polynucleotide
cgatgtgaaggtattcca

SEQ ID NO: 5864 - DNA, 17 bp, Artificial Sequence
  Synthetic Polynucleotide
gaccgaggagaaagacg

SEQ ID NO: 5865 - DNA, 18 bp, Artificial Sequence
  Synthetic Polynucleotide
ggtcgaagttacatggag

SEQ ID NO: 5866 - DNA, 20 bp, Artificial Sequence
  Synthetic Polynucleotide
ttcgaaggtgatgatcgttt

SEQ ID NO: 5867 - DNA, 19 bp, Artificial Sequence
  Synthetic Polynucleotide
cctcaatcaatgggattcc

SEQ ID NO: 5868 - DNA, 17 bp, Artificial Sequence
  Synthetic Polynucleotide
tcagatggtgctgtacg

SEQ ID NO: 5869 - DNA, 20 bp, Artificial Sequence
  Synthetic Polynucleotide
ggagaaaacagaaaggtgaa

SEQ ID NO: 5870 - DNA, 20 bp, Artificial Sequence
  Synthetic Polynucleotide
ccaaagagatttatcgaagt

SEQ ID NO: 5871 - DNA, 17 bp, Artificial Sequence
  Synthetic Polynucleotide
acccgttttcagttgag

SEQ ID NO: 5872 - DNA, 17 bp, Artificial Sequence
  Synthetic Polynucleotide
gcggctatgatgccatg

SEQ ID NO: 5873 - DNA, 20 bp, Artificial Sequence
  Synthetic Polynucleotide
gttttaccaacattttgagc

SEQ ID NO: 5874 - DNA, 19 bp, Artificial Sequence
  Synthetic Polynucleotide
aaggacgtttgcgatgcaa

SEQ ID NO: 5875 - DNA, 20 bp, Artificial Sequence
  Synthetic Polynucleotide
ggaacaggtgattctcagct

SEQ ID NO: 5876 - DNA, 17 bp, Artificial Sequence
  Synthetic Polynucleotide
tcagtaaccaacgccaa

SEQ ID NO: 5877 - DNA, 20 bp, Artificial Sequence
  Synthetic Polynucleotide
gacagcatcttactttactt

SEQ ID NO: 5878 - DNA, 17 bp, Artificial Sequence
  Synthetic Polynucleotide
tgtgattcgtgaagcga

SEQ ID NO: 5879 - DNA, 19 bp, Artificial Sequence
  Synthetic Polynucleotide
gtcagattcgttcagctta

SEQ ID NO: 5880 - DNA, 17 bp, Artificial Sequence
  Synthetic Polynucleotide
ccgggatcagagacatt

SEQ ID NO: 5881 - DNA, 18 bp, Artificial Sequence
  Synthetic Polynucleotide
tcccttctccaccttgtg

SEQ ID NO: 5882 - DNA, 17 bp, Artificial Sequence
  Synthetic Polynucleotide
cggggcttagtattacc

SEQ ID NO: 5883 - DNA, 19 bp, Artificial Sequence
  Synthetic Polynucleotide
tagttcatcatctccgaag

SEQ ID NO: 5884 - DNA, 18 bp, Artificial Sequence
  Synthetic Polynucleotide
cccgaagaaatgcaattg

SEQ ID NO: 5885 - DNA, 18 bp, Artificial Sequence
  Synthetic Polynucleotide
tattcgttacctttgctt

SEQ ID NO: 5886 - DNA, 18 bp, Artificial Sequence
  Synthetic Polynucleotide
gcggggcttagtattacc

SEQ ID NO: 5887 - DNA, 20 bp, Artificial Sequence
  Synthetic Polynucleotide
ccaccaaccttccttcaagg

SEQ ID NO: 5888 - DNA, 19 bp, Artificial Sequence
  Synthetic Polynucleotide
atgaattgttgaagacgat

SEQ ID NO: 5889 - DNA, 18 bp, Artificial Sequence
  Synthetic Polynucleotide
atttcatagcgtgttgta

SEQ ID NO: 5890 - DNA, 17 bp, Artificial Sequence
  Synthetic Polynucleotide
cgctggggcttattatt

SEQ ID NO: 5891 - DNA, 19 bp, Artificial Sequence
  Synthetic Polynucleotide
atccatatcctccgaatgg

SEQ ID NO: 5892 - DNA, 18 bp, Artificial Sequence
  Synthetic Polynucleotide
ctgtgtttaacggaagct

SEQ ID NO: 5893 - DNA, 19 bp, Artificial Sequence
  Synthetic Polynucleotide
gttgcctccatagaaactg

SEQ ID NO: 5894 - DNA, 19 bp, Artificial Sequence
  Synthetic Polynucleotide
gctcacactgcaactaaca

SEQ ID NO: 5895 - DNA, 17 bp, Artificial Sequence
  Synthetic Polynucleotide
gatgtgggacttctctc

SEQ ID NO: 5896 - DNA, 19 bp, Artificial Sequence
  Synthetic Polynucleotide
taatcatcctgttcatgta

SEQ ID NO: 5897 - DNA, 19 bp, Artificial Sequence
  Synthetic Polynucleotide
ccaatgattttcctcctgg

SEQ ID NO: 5898 - DNA, 18 bp, Artificial Sequence
  Synthetic Polynucleotide
ggggcttattattacccc

SEQ ID NO: 5899 - DNA, 18 bp, Artificial Sequence
  Synthetic Polynucleotide
gctcagttctccaaccta

SEQ ID NO: 5900 - DNA, 18 bp, Artificial Sequence
  Synthetic Polynucleotide
gtgcaatccacttgttgg

SEQ ID NO: 5901 - DNA, 19 bp, Artificial Sequence
  Synthetic Polynucleotide
atttcgttttgggtcctcg

SEQ ID NO: 5902 - DNA, 18 bp, Artificial Sequence
  Synthetic Polynucleotide
tagagactactgttcgaa

SEQ ID NO: 5903 - DNA, 20 bp, Artificial Sequence
  Synthetic Polynucleotide
ttcatagcgtgttgtatgtt

SEQ ID NO: 5904 - DNA, 18 bp, Artificial Sequence
  Synthetic Polynucleotide
gggttttgggctcatggg

SEQ ID NO: 5905 - DNA, 17 bp, Artificial Sequence
  Synthetic Polynucleotide
cttgggttttacctcca

SEQ ID NO: 5906 - DNA, 17 bp, Artificial Sequence
  Synthetic Polynucleotide
tatttgggtctacggcc

SEQ ID NO: 5907 - DNA, 19 bp, Artificial Sequence
  Synthetic Polynucleotide
aactccaattcgcaatagg

SEQ ID NO: 5908 - DNA, 20 bp, Artificial Sequence
  Synthetic Polynucleotide
cttcgtctaaggttgtaagt

SEQ ID NO: 5909 - DNA, 19 bp, Artificial Sequence
  Synthetic Polynucleotide
ccatacacccaaagaatac

SEQ ID NO: 5910 - DNA, 20 bp, Artificial Sequence
  Synthetic Polynucleotide
agaagaaacaagagttgcag

SEQ ID NO: 5911 - DNA, 20 bp, Artificial Sequence
  Synthetic Polynucleotide
tctctctaacgctgtcttat

SEQ ID NO: 5912 - DNA, 19 bp, Artificial Sequence
  Synthetic Polynucleotide
gtattaccccgcctcgtta

SEQ ID NO: 5913 - DNA, 18 bp, Artificial Sequence
  Synthetic Polynucleotide
tatctgctgacaatcact

SEQ ID NO: 5914 - DNA, 18 bp, Artificial Sequence
  Synthetic Polynucleotide
ttccgaaatcactcgtcg

SEQ ID NO: 5915 - DNA, 20 bp, Artificial Sequence
  Synthetic Polynucleotide
ttatacacacccaaaggata

SEQ ID NO: 5916 - DNA, 17 bp, Artificial Sequence
  Synthetic Polynucleotide
gacccgcacatgcctaa

SEQ ID NO: 5917 - DNA, 19 bp, Artificial Sequence
  Synthetic Polynucleotide
ctaagcgtagtttccccac

SEQ ID NO: 5918 - DNA, 19 bp, Artificial Sequence
  Synthetic Polynucleotide
attgggctactcttcttgt

SEQ ID NO: 5919 - DNA, 17 bp, Artificial Sequence
  Synthetic Polynucleotide
aatggctttcctgtgga

SEQ ID NO: 5920 - DNA, 17 bp, Artificial Sequence
  Synthetic Polynucleotide
ggttttgcacaatcgat

SEQ ID NO: 5921 - DNA, 17 bp, Artificial Sequence
  Synthetic Polynucleotide
attataccgtgcctgag

SEQ ID NO: 5922 - DNA, 19 bp, Artificial Sequence
  Synthetic Polynucleotide
ggttactgtgtaccgtttt

SEQ ID NO: 5923 - DNA, 19 bp, Artificial Sequence
  Synthetic Polynucleotide
gaatatgacattggactcg

SEQ ID NO: 5924 - DNA, 20 bp, Artificial Sequence
  Synthetic Polynucleotide
tgataatcctagagcattgt

SEQ ID NO: 5925 - DNA, 20 bp, Artificial Sequence
  Synthetic Polynucleotide
accagctccgatagaaaatg

SEQ ID NO: 5926 - DNA, 19 bp, Artificial Sequence
  Synthetic Polynucleotide
caaggctttctgacttatg

SEQ ID NO: 5927 - DNA, 18 bp, Artificial Sequence
  Synthetic Polynucleotide
atttcacccttcaacagt

SEQ ID NO: 5928 - DNA, 20 bp, Artificial Sequence
  Synthetic Polynucleotide
gaccatctacactgactgca

SEQ ID NO: 5929 - DNA, 19 bp, Artificial Sequence
  Synthetic Polynucleotide
aacgaagttctttacgaac

SEQ ID NO: 5930 - DNA, 19 bp, Artificial Sequence
  Synthetic Polynucleotide
tcttctgcaactgatagat

SEQ ID NO: 5931 - DNA, 20 bp, Artificial Sequence
  Synthetic Polynucleotide
tatgaactgtacttacgatt

SEQ ID NO: 5932 - DNA, 19 bp, Artificial Sequence
  Synthetic Polynucleotide
cccatttgttacctatgac

SEQ ID NO: 5933 - DNA, 20 bp, Artificial Sequence
  Synthetic Polynucleotide
gaaggtgaaccaaaatccct

SEQ ID NO: 5934 - DNA, 19 bp, Artificial Sequence
  Synthetic Polynucleotide
atcccggcaaacgaaatta

SEQ ID NO: 5935 - DNA, 17 bp, Artificial Sequence
  Synthetic Polynucleotide
gccgaagcgtaggacag

SEQ ID NO: 5936 - DNA, 17 bp, Artificial Sequence
  Synthetic Polynucleotide
aagttccactgagctgg

SEQ ID NO: 5937 - DNA, 18 bp, Artificial Sequence
  Synthetic Polynucleotide
gctaacggtaacccaaca

SEQ ID NO: 5938 - DNA, 18 bp, Artificial Sequence
  Synthetic Polynucleotide
cgacaaagcacccaagga

SEQ ID NO: 5939 - DNA, 17 bp, Artificial Sequence
  Synthetic Polynucleotide
attgccccatagcccca

SEQ ID NO: 5940 - DNA, 18 bp, Artificial Sequence
  Synthetic Polynucleotide
cttggagaacaccagatc

SEQ ID NO: 5941 - DNA, 17 bp, Artificial Sequence
  Synthetic Polynucleotide
cgctagaacaccatcta

SEQ ID NO: 5942 - DNA, 19 bp, Artificial Sequence
  Synthetic Polynucleotide
ccaagttccaaaatggtta

SEQ ID NO: 5943 - DNA, 18 bp, Artificial Sequence
  Synthetic Polynucleotide
gtcattaccctctcgacc

SEQ ID NO: 5944 - DNA, 17 bp, Artificial Sequence
  Synthetic Polynucleotide
agccgcagattagcttc

SEQ ID NO: 5945 - DNA, 19 bp, Artificial Sequence
  Synthetic Polynucleotide
acgaaacctgtattatccg

SEQ ID NO: 5946 - DNA, 20 bp, Artificial Sequence
  Synthetic Polynucleotide
gccttataatgtgtcaatga

SEQ ID NO: 5947 - DNA, 18 bp, Artificial Sequence
  Synthetic Polynucleotide
atcagtaccacctccggg

SEQ ID NO: 5948 - DNA, 17 bp, Artificial Sequence
  Synthetic Polynucleotide
tcgtcagtcgcagtacc

SEQ ID NO: 5949 - DNA, 18 bp, Artificial Sequence
  Synthetic Polynucleotide
aatcaaacccacaaggaa

SEQ ID NO: 5950 - DNA, 20 bp, Artificial Sequence
  Synthetic Polynucleotide
tagagtatcgtccgaatcca

SEQ ID NO: 5951 - DNA, 17 bp, Artificial Sequence
  Synthetic Polynucleotide
tttgaggaccatcccca

SEQ ID NO: 5952 - DNA, 19 bp, Artificial Sequence
  Synthetic Polynucleotide
gcagatccacaaagttcac

SEQ ID NO: 5953 - DNA, 17 bp, Artificial Sequence
  Synthetic Polynucleotide
aaccgcaccctgataat

SEQ ID NO: 5954 - DNA, 20 bp, Artificial Sequence
  Synthetic Polynucleotide
ttccatgccacaaattaatc

SEQ ID NO: 5955 - DNA, 18 bp, Artificial Sequence
  Synthetic Polynucleotide
ggttcagatagcatcatg

SEQ ID NO: 5956 - DNA, 19 bp, Artificial Sequence
  Synthetic Polynucleotide
cgacaacaacgtcccaaag

SEQ ID NO: 5957 - DNA, 18 bp, Artificial Sequence
  Synthetic Polynucleotide
ccccaacaaatgccatta

SEQ ID NO: 5958 - DNA, 18 bp, Artificial Sequence
  Synthetic Polynucleotide
ttcaggatggtgatatgg

SEQ ID NO: 5959 - DNA, 17 bp, Artificial Sequence
  Synthetic Polynucleotide
gcatttccagtttgcat

SEQ ID NO: 5960 - DNA, 20 bp, Artificial Sequence
  Synthetic Polynucleotide
tgcaggccctaaaacgaaag

SEQ ID NO: 5961 - DNA, 17 bp, Artificial Sequence
  Synthetic Polynucleotide
ttccagctttggtcagt

SEQ ID NO: 5962 - DNA, 17 bp, Artificial Sequence
  Synthetic Polynucleotide
cctgaggtggaggtacc

SEQ ID NO: 5963 - DNA, 19 bp, Artificial Sequence
  Synthetic Polynucleotide
tctagatagtaagtgccat

SEQ ID NO: 5964 - DNA, 18 bp, Artificial Sequence
  Synthetic Polynucleotide
aagtgcttaaggtatcgc

SEQ ID NO: 5965 - DNA, 19 bp, Artificial Sequence
  Synthetic Polynucleotide
gttctaacaactgttcctg

SEQ ID NO: 5966 - DNA, 17 bp, Artificial Sequence
  Synthetic Polynucleotide
ggctattctgaagtgga

SEQ ID NO: 5967 - DNA, 19 bp, Artificial Sequence
  Synthetic Polynucleotide
acattgtcatgtatcccac

SEQ ID NO: 5968 - DNA, 18 bp, Artificial Sequence
  Synthetic Polynucleotide
gacatggtccagattaga

SEQ ID NO: 5969 - DNA, 17 bp, Artificial Sequence
  Synthetic Polynucleotide
caccaggtaaaaggtca

SEQ ID NO: 5970 - DNA, 17 bp, Artificial Sequence
  Synthetic Polynucleotide
aagaagacgagggagag

SEQ ID NO: 5971 - DNA, 19 bp, Artificial Sequence
  Synthetic Polynucleotide
ttgccaatcctctaaaata

SEQ ID NO: 5972 - DNA, 19 bp, Artificial Sequence
  Synthetic Polynucleotide
tagtcttagaaagcgtcgt

SEQ ID NO: 5973 - DNA, 18 bp, Artificial Sequence
  Synthetic Polynucleotide
tcctgtaatgtccacggt

SEQ ID NO: 5974 - DNA, 19 bp, Artificial Sequence
  Synthetic Polynucleotide
gtttagatgtgtgccagga

SEQ ID NO: 5975 - DNA, 20 bp, Artificial Sequence
  Synthetic Polynucleotide
tgtctgaggtaggttctgta

SEQ ID NO: 5976 - DNA, 19 bp, Artificial Sequence
  Synthetic Polynucleotide
taagtcaggagttccaatt

SEQ ID NO: 5977 - DNA, 19 bp, Artificial Sequence
  Synthetic Polynucleotide
aggtttcccaggtatatga

SEQ ID NO: 5978 - DNA, 18 bp, Artificial Sequence
  Synthetic Polynucleotide
agatgatgctgccaggta

SEQ ID NO: 5979 - DNA, 17 bp, Artificial Sequence
  Synthetic Polynucleotide
cggcccgaactttagac

SEQ ID NO: 5980 - DNA, 19 bp, Artificial Sequence
  Synthetic Polynucleotide
aacaaagtgtccgccgttg

SEQ ID NO: 5981 - DNA, 20 bp, Artificial Sequence
  Synthetic Polynucleotide
acaagcccataaaccccagt

SEQ ID NO: 5982 - DNA, 18 bp, Artificial Sequence
  Synthetic Polynucleotide
gcactacaaaacgaaagt

SEQ ID NO: 5983 - DNA, 20 bp, Artificial Sequence
  Synthetic Polynucleotide
cactaggtgtccccataaat

SEQ ID NO: 5984 - DNA, 18 bp, Artificial Sequence
  Synthetic Polynucleotide
cgtgcaattagccagtcc

SEQ ID NO: 5985 - DNA, 20 bp, Artificial Sequence
  Synthetic Polynucleotide
gattaggtgtgtcttggtgg

SEQ ID NO: 5986 - DNA, 18 bp, Artificial Sequence
  Synthetic Polynucleotide
ctgttcctgtgagtaagt

SEQ ID NO: 5987 - DNA, 17 bp, Artificial Sequence
  Synthetic Polynucleotide
ccagtgttccccaatag

SEQ ID NO: 5988 - DNA, 17 bp, Artificial Sequence
  Synthetic Polynucleotide
cagatggctttgtggcg

SEQ ID NO: 5989 - DNA, 19 bp, Artificial Sequence
  Synthetic Polynucleotide
ggtatccagacactttggg

SEQ ID NO: 5990 - DNA, 20 bp, Artificial Sequence
  Synthetic Polynucleotide
cctactgttgtggatgtagg

SEQ ID NO: 5991 - DNA, 19 bp, Artificial Sequence
  Synthetic Polynucleotide
ctgtatcaatcatatcgcc

SEQ ID NO: 5992 - DNA, 18 bp, Artificial Sequence
  Synthetic Polynucleotide
ttattgaacctgtgggtc

SEQ ID NO: 5993 - DNA, 19 bp, Artificial Sequence
  Synthetic Polynucleotide
catttctgaggtatgtgtc

SEQ ID NO: 5994 - DNA, 17 bp, Artificial Sequence
  Synthetic Polynucleotide
gactgtgcaactatggt

SEQ ID NO: 5995 - DNA, 19 bp, Artificial Sequence
  Synthetic Polynucleotide
atctgactttgtggcattt

SEQ ID NO: 5996 - DNA, 19 bp, Artificial Sequence
  Synthetic Polynucleotide
cagacgagattgctgctgc

SEQ ID NO: 5997 - DNA, 20 bp, Artificial Sequence
  Synthetic Polynucleotide
gtcttcttggtcacttagat

SEQ ID NO: 5998 - DNA, 17 bp, Artificial Sequence
  Synthetic Polynucleotide
acctgcattgtgacgaa

SEQ ID NO: 5999 - DNA, 18 bp, Artificial Sequence
  Synthetic Polynucleotide
ctgtgtttgttttgggtc

SEQ ID NO: 6000 - DNA, 17 bp, Artificial Sequence
  Synthetic Polynucleotide
atttgaaaatcccgcct

SEQ ID NO: 6001 - DNA, 19 bp, Artificial Sequence
  Synthetic Polynucleotide
ggatcagtacctttatcgt

SEQ ID NO: 6002 - DNA, 17 bp, Artificial Sequence
  Synthetic Polynucleotide
ccagcccattgacctgc

SEQ ID NO: 6003 - DNA, 17 bp, Artificial Sequence
  Synthetic Polynucleotide
gggtttgttttgcatca

SEQ ID NO: 6004 - DNA, 17 bp, Artificial Sequence
  Synthetic Polynucleotide
tcagttcagggtgttta

SEQ ID NO: 6005 - DNA, 19 bp, Artificial Sequence
  Synthetic Polynucleotide
atggactgcctaaatactt

SEQ ID NO: 6006 - DNA, 18 bp, Artificial Sequence
  Synthetic Polynucleotide
ggatgaggatgaggatga

SEQ ID NO: 6007 - DNA, 19 bp, Artificial Sequence
  Synthetic Polynucleotide
tgagccttttgtatccagt

SEQ ID NO: 6008 - DNA, 18 bp, Artificial Sequence
  Synthetic Polynucleotide
tatgtgtgatattggctt

SEQ ID NO: 6009 - DNA, 19 bp, Artificial Sequence
  Synthetic Polynucleotide
aggtttatcagtttgtggt

SEQ ID NO: 6010 - DNA, 20 bp, Artificial Sequence
  Synthetic Polynucleotide
tttgaatttgaaaatcccgc

SEQ ID NO: 6011 - DNA, 19 bp, Artificial Sequence
  Synthetic Polynucleotide
tcgtggcatcatattgagc

SEQ ID NO: 6012 - DNA, 17 bp, Artificial Sequence
  Synthetic Polynucleotide
agcccattgtaccattt

SEQ ID NO: 6013 - DNA, 20 bp, Artificial Sequence
  Synthetic Polynucleotide
aaaagttagctgttgtttct

SEQ ID NO: 6014 - DNA, 19 bp, Artificial Sequence
  Synthetic Polynucleotide
ccttgttcttattgtgcct

SEQ ID NO: 6015 - DNA, 17 bp, Artificial Sequence
  Synthetic Polynucleotide
acatttgaaaatcccgc

SEQ ID NO: 6016 - DNA, 20 bp, Artificial Sequence
  Synthetic Polynucleotide
tagtcatgttctctgttcct

SEQ ID NO: 6017 - DNA, 18 bp, Artificial Sequence
  Synthetic Polynucleotide
gttgttttgctctcttcc

SEQ ID NO: 6018 - DNA, 18 bp, Artificial Sequence
  Synthetic Polynucleotide
aaatgccttccagttttc

SEQ ID NO: 6019 - DNA, 17 bp, Artificial Sequence
  Synthetic Polynucleotide
gcaatgcacaagcaaaa

SEQ ID NO: 6020 - DNA, 20 bp, Artificial Sequence
  Synthetic Polynucleotide
agtcaggtcaatgttccaga

SEQ ID NO: 6021 - DNA, 18 bp, Artificial Sequence
  Synthetic Polynucleotide
gcaggaaaacaagtcaga

SEQ ID NO: 6022 - DNA, 17 bp, Artificial Sequence
  Synthetic Polynucleotide
cagtgtcttgtcgctac

SEQ ID NO: 6023 - DNA, 19 bp, Artificial Sequence
  Synthetic Polynucleotide
ggtatctagtgatgctcaa

SEQ ID NO: 6024 - DNA, 20 bp, Artificial Sequence
  Synthetic Polynucleotide
tgaaaccagagtagggtgat

SEQ ID NO: 6025 - DNA, 17 bp, Artificial Sequence
  Synthetic Polynucleotide
aatacctcggccttacg

SEQ ID NO: 6026 - DNA, 17 bp, Artificial Sequence
  Synthetic Polynucleotide
gggcaggaaatggtcaa

SEQ ID NO: 6027 - DNA, 17 bp, Artificial Sequence
  Synthetic Polynucleotide
tacagggtgtttcgcat

SEQ ID NO: 6028 - DNA, 18 bp, Artificial Sequence
  Synthetic Polynucleotide
cggtctgtcggttcttgt

SEQ ID NO: 6029 - DNA, 17 bp, Artificial Sequence
  Synthetic Polynucleotide
cagttcatgtgtttgga

SEQ ID NO: 6030 - DNA, 20 bp, Artificial Sequence
  Synthetic Polynucleotide
ggaggtccccatataactat

SEQ ID NO: 6031 - DNA, 19 bp, Artificial Sequence
  Synthetic Polynucleotide
cgatttatctcagatggtc

SEQ ID NO: 6032 - DNA, 20 bp, Artificial Sequence
  Synthetic Polynucleotide
ctaattgtctccaaagcctt

SEQ ID NO: 6033 - DNA, 20 bp, Artificial Sequence
  Synthetic Polynucleotide
gtctgaagccaaaatagctt

SEQ ID NO: 6034 - DNA, 19 bp, Artificial Sequence
  Synthetic Polynucleotide
aagagatgatgtagtggct

SEQ ID NO: 6035 - DNA, 18 bp, Artificial Sequence
  Synthetic Polynucleotide
cgtgtttatatcgccatc

SEQ ID NO: 6036 - DNA, 17 bp, Artificial Sequence
  Synthetic Polynucleotide
gggtgtccagtatgaag

SEQ ID NO: 6037 - DNA, 20 bp, Artificial Sequence
  Synthetic Polynucleotide
tcagttgtatcgtgactgct

SEQ ID NO: 6038 - DNA, 18 bp, Artificial Sequence
  Synthetic Polynucleotide
tgttacagggtctgtggg

SEQ ID NO: 6039 - DNA, 18 bp, Artificial Sequence
  Synthetic Polynucleotide
tagggtagggtgtagtag

SEQ ID NO: 6040 - DNA, 18 bp, Artificial Sequence
  Synthetic Polynucleotide
ccatgtgtgtcctcttcc

SEQ ID NO: 6041 - DNA, 19 bp, Artificial Sequence
  Synthetic Polynucleotide
caaattgggtagtagtgtg

SEQ ID NO: 6042 - DNA, 20 bp, Artificial Sequence
  Synthetic Polynucleotide
gtcttgtagtgtctaaccat

SEQ ID NO: 6043 - DNA, 20 bp, Artificial Sequence
  Synthetic Polynucleotide
tgggatacggaatctacagg

SEQ ID NO: 6044 - DNA, 18 bp, Artificial Sequence
  Synthetic Polynucleotide
tcctcttcctcgtcggaa

SEQ ID NO: 6045 - DNA, 20 bp, Artificial Sequence
  Synthetic Polynucleotide
ggatggaaaagtaaagactt

SEQ ID NO: 6046 - DNA, 20 bp, Artificial Sequence
  Synthetic Polynucleotide
ggaataggtagaagttggtg

SEQ ID NO: 6047 - DNA, 17 bp, Artificial Sequence
  Synthetic Polynucleotide
gcgtttcattgtaggac

SEQ ID NO: 6048 - DNA, 17 bp, Artificial Sequence
  Synthetic Polynucleotide
ggatcagcagtttctgt

SEQ ID NO: 6049 - DNA, 20 bp, Artificial Sequence
  Synthetic Polynucleotide
tttaatcaggacattgcaga

SEQ ID NO: 6050 - DNA, 20 bp, Artificial Sequence
  Synthetic Polynucleotide
gctatgaagcaacgaataca

SEQ ID NO: 6051 - DNA, 18 bp, Artificial Sequence
  Synthetic Polynucleotide
accgacgcagctatccgt

SEQ ID NO: 6052 - DNA, 18 bp, Artificial Sequence
  Synthetic Polynucleotide
tacaaagagggttggatt

SEQ ID NO: 6053 - DNA, 19 bp, Artificial Sequence
  Synthetic Polynucleotide
gtgtcagtgcccaaggttt

SEQ ID NO: 6054 - DNA, 17 bp, Artificial Sequence
  Synthetic Polynucleotide
gttgcactcacactgca

SEQ ID NO: 6055 - DNA, 17 bp, Artificial Sequence
  Synthetic Polynucleotide
aatatgcgtgccaccta

SEQ ID NO: 6056 - DNA, 17 bp, Artificial Sequence
  Synthetic Polynucleotide
gccatcccattgtcctt

SEQ ID NO: 6057 - DNA, 18 bp, Artificial Sequence
  Synthetic Polynucleotide
tgctttatgcctcttagc

SEQ ID NO: 6058 - DNA, 20 bp, Artificial Sequence
  Synthetic Polynucleotide
cttgattcattactcccaca

SEQ ID NO: 6059 - DNA, 19 bp, Artificial Sequence
  Synthetic Polynucleotide
atataccaacctgaccatc

SEQ ID NO: 6060 - DNA, 20 bp, Artificial Sequence
  Synthetic Polynucleotide
gactggattacaccaagact

SEQ ID NO: 6061 - DNA, 20 bp, Artificial Sequence
  Synthetic Polynucleotide
aagaagattctgaagttgag

SEQ ID NO: 6062 - DNA, 20 bp, Artificial Sequence
  Synthetic Polynucleotide
tcatcttgagcatgatattt

SEQ ID NO: 6063 - DNA, 18 bp, Artificial Sequence
  Synthetic Polynucleotide
ccattcctgctacagatg

SEQ ID NO: 6064 - DNA, 19 bp, Artificial Sequence
  Synthetic Polynucleotide
caccactcttcgacccagg

SEQ ID NO: 6065 - DNA, 17 bp, Artificial Sequence
  Synthetic Polynucleotide
tcaagccctgagagagg

SEQ ID NO: 6066 - DNA, 19 bp, Artificial Sequence
  Synthetic Polynucleotide
gcattgaaaacactccctg

SEQ ID NO: 6067 - DNA, 18 bp, Artificial Sequence
  Synthetic Polynucleotide
attacgatgatgagctgt

SEQ ID NO: 6068 - DNA, 18 bp, Artificial Sequence
  Synthetic Polynucleotide
gacattttgacttgtccc

SEQ ID NO: 6069 - DNA, 20 bp, Artificial Sequence
  Synthetic Polynucleotide
acaagtgaaaatgtctcttc

SEQ ID NO: 6070 - DNA, 20 bp, Artificial Sequence
  Synthetic Polynucleotide
ttcaataaagaagaccatga

SEQ ID NO: 6071 - DNA, 20 bp, Artificial Sequence
  Synthetic Polynucleotide
gttacaacaagagttcctag

SEQ ID NO: 6072 - DNA, 20 bp, Artificial Sequence
  Synthetic Polynucleotide
tccatatttcctatccatgt

SEQ ID NO: 6073 - DNA, 20 bp, Artificial Sequence
  Synthetic Polynucleotide
ggtcctaatactgctagtca

SEQ ID NO: 6074 - DNA, 19 bp, Artificial Sequence
  Synthetic Polynucleotide
ggtacatctctaccaagta

SEQ ID NO: 6075 - DNA, 20 bp, Artificial Sequence
  Synthetic Polynucleotide
cactcatgtcaccaaatata

SEQ ID NO: 6076 - DNA, 19 bp, Artificial Sequence
  Synthetic Polynucleotide
catcacatctttccatgtt

SEQ ID NO: 6077 - DNA, 18 bp, Artificial Sequence
  Synthetic Polynucleotide
atgctacactgatcctta

SEQ ID NO: 6078 - DNA, 18 bp, Artificial Sequence
  Synthetic Polynucleotide
ctttgccatcccattgtc

SEQ ID NO: 6079 - DNA, 19 bp, Artificial Sequence
  Synthetic Polynucleotide
tatcccaaacataaccatg

SEQ ID NO: 6080 - DNA, 20 bp, Artificial Sequence
  Synthetic Polynucleotide
tacctgaatgatctacaatc

SEQ ID NO: 6081 - DNA, 19 bp, Artificial Sequence
  Synthetic Polynucleotide
cactgtctaacattgtagg

SEQ ID NO: 6082 - DNA, 20 bp, Artificial Sequence
  Synthetic Polynucleotide
tcgataaacctttcatactc

SEQ ID NO: 6083 - DNA, 17 bp, Artificial Sequence
  Synthetic Polynucleotide
cacacccaccccacaca

SEQ ID NO: 6084 - DNA, 20 bp, Artificial Sequence
  Synthetic Polynucleotide
atctcatctctgtcttgata

SEQ ID NO: 6085 - DNA, 19 bp, Artificial Sequence
  Synthetic Polynucleotide
gacctccttcattttgcaa

SEQ ID NO: 6086 - DNA, 17 bp, Artificial Sequence
  Synthetic Polynucleotide
tataacccgattgtcct

SEQ ID NO: 6087 - DNA, 18 bp, Artificial Sequence
  Synthetic Polynucleotide
caggcgatgatgtctatg

SEQ ID NO: 6088 - DNA, 19 bp, Artificial Sequence
  Synthetic Polynucleotide
caactgcaccctgttgttt

SEQ ID NO: 6089 - DNA, 18 bp, Artificial Sequence
  Synthetic Polynucleotide
cagtgtcctaatgcaggc

SEQ ID NO: 6090 - DNA, 18 bp, Artificial Sequence
  Synthetic Polynucleotide
ccctcaataccacccata

SEQ ID NO: 6091 - DNA, 19 bp, Artificial Sequence
  Synthetic Polynucleotide
aagttctgcttaaattgga

SEQ ID NO: 6092 - DNA, 17 bp, Artificial Sequence
  Synthetic Polynucleotide
gggtccatgatcttgat

SEQ ID NO: 6093 - DNA, 19 bp, Artificial Sequence
  Synthetic Polynucleotide
gtgcaacccaatatgtcac

SEQ ID NO: 6094 - DNA, 18 bp, Artificial Sequence
  Synthetic Polynucleotide
tgctcctccatgtctatc

SEQ ID NO: 6095 - DNA, 20 bp, Artificial Sequence
  Synthetic Polynucleotide
actttctcttcaaagttgga

SEQ ID NO: 6096 - DNA, 19 bp, Artificial Sequence
  Synthetic Polynucleotide
ttgtccaagtatcctgtta

SEQ ID NO: 6097 - DNA, 18 bp, Artificial Sequence
  Synthetic Polynucleotide
gcccctggaaactatcca

SEQ ID NO: 6098 - DNA, 19 bp, Artificial Sequence
  Synthetic Polynucleotide
atttcatttgcgtcgaaga

SEQ ID NO: 6099 - DNA, 18 bp, Artificial Sequence
  Synthetic Polynucleotide
tcggtgtgttttctggtc

SEQ ID NO: 6100 - DNA, 19 bp, Artificial Sequence
  Synthetic Polynucleotide
ccattctctgttttggatg

SEQ ID NO: 6101 - DNA, 20 bp, Artificial Sequence
  Synthetic Polynucleotide
tttaatggatctaaatccgc

SEQ ID NO: 6102 - DNA, 19 bp, Artificial Sequence
  Synthetic Polynucleotide
ccttgttggaatttctgat

SEQ ID NO: 6103 - DNA, 18 bp, Artificial Sequence
  Synthetic Polynucleotide
agcttcaaccctggaaaa

SEQ ID NO: 6104 - DNA, 17 bp, Artificial Sequence
  Synthetic Polynucleotide
cagacctaacctctccg

SEQ ID NO: 6105 - DNA, 20 bp, Artificial Sequence
  Synthetic Polynucleotide
ctttagtaagttgaccactt

SEQ ID NO: 6106 - DNA, 18 bp, Artificial Sequence
  Synthetic Polynucleotide
gtcacaaacctgtgagac

SEQ ID NO: 6107 - DNA, 17 bp, Artificial Sequence
  Synthetic Polynucleotide
tagcaaagttccttctg

SEQ ID NO: 6108 - DNA, 18 bp, Artificial Sequence
  Synthetic Polynucleotide
ttcgtctccgatgatctt

SEQ ID NO: 6109 - DNA, 19 bp, Artificial Sequence
  Synthetic Polynucleotide
aaattgatgccgaatgtaa

SEQ ID NO: 6110 - DNA, 18 bp, Artificial Sequence
  Synthetic Polynucleotide
agcttgaaccactcattc

SEQ ID NO: 6111 - DNA, 17 bp, Artificial Sequence
  Synthetic Polynucleotide
gcgcttgtataccgagt

SEQ ID NO: 6112 - DNA, 20 bp, Artificial Sequence
  Synthetic Polynucleotide
cctccttgtcgataaacgaa

SEQ ID NO: 6113 - DNA, 19 bp, Artificial Sequence
  Synthetic Polynucleotide
tccgctaggataccatctg

SEQ ID NO: 6114 - DNA, 19 bp, Artificial Sequence
  Synthetic Polynucleotide
gagtcgtcaccactacacg

SEQ ID NO: 6115 - DNA, 17 bp, Artificial Sequence
  Synthetic Polynucleotide
caacaaaccgtacatgc

SEQ ID NO: 6116 - DNA, 20 bp, Artificial Sequence
  Synthetic Polynucleotide
ttcttgacaatagcagtttt

SEQ ID NO: 6117 - DNA, 20 bp, Artificial Sequence
  Synthetic Polynucleotide
gccctgctcacatcttagat

SEQ ID NO: 6118 - DNA, 17 bp, Artificial Sequence
  Synthetic Polynucleotide
cctcatcttggttggat

SEQ ID NO: 6119 - DNA, 18 bp, Artificial Sequence
  Synthetic Polynucleotide
aagacatctggggtaaaa

SEQ ID NO: 6120 - DNA, 18 bp, Artificial Sequence
  Synthetic Polynucleotide
cctatccagtcaaaaggg

SEQ ID NO: 6121 - DNA, 18 bp, Artificial Sequence
  Synthetic Polynucleotide
ctgctctacctcaacttt

SEQ ID NO: 6122 - DNA, 20 bp, Artificial Sequence
  Synthetic Polynucleotide
agcaaatccgtctggggtaa

SEQ ID NO: 6123 - DNA, 19 bp, Artificial Sequence
  Synthetic Polynucleotide
ctatccctggaaactttca

SEQ ID NO: 6124 - DNA, 20 bp, Artificial Sequence
  Synthetic Polynucleotide
tcaattagaccatcgaaaat

SEQ ID NO: 6125 - DNA, 18 bp, Artificial Sequence
  Synthetic Polynucleotide
gacctgtctacgcaatgg

SEQ ID NO: 6126 - DNA, 19 bp, Artificial Sequence
  Synthetic Polynucleotide
ttctgtcatcaggaattgg

SEQ ID NO: 6127 - DNA, 19 bp, Artificial Sequence
  Synthetic Polynucleotide
tcactcctcgtcacaacat

SEQ ID NO: 6128 - DNA, 19 bp, Artificial Sequence
  Synthetic Polynucleotide
aaagttagctctgttagct

SEQ ID NO: 6129 - DNA, 18 bp, Artificial Sequence
  Synthetic Polynucleotide
tgcctttcgtcctcttca

SEQ ID NO: 6130 - DNA, 19 bp, Artificial Sequence
  Synthetic Polynucleotide
ttatctctgttcatgtcgt

SEQ ID NO: 6131 - DNA, 19 bp, Artificial Sequence
  Synthetic Polynucleotide
gaagccatttgtgctgtgc

SEQ ID NO: 6132 - DNA, 20 bp, Artificial Sequence
  Synthetic Polynucleotide
gatagccactcagtagtaga

SEQ ID NO: 6133 - DNA, 19 bp, Artificial Sequence
  Synthetic Polynucleotide
tcttcactcagatcattgg

SEQ ID NO: 6134 - DNA, 18 bp, Artificial Sequence
  Synthetic Polynucleotide
gggttgtcgtcttgattg

SEQ ID NO: 6135 - DNA, 19 bp, Artificial Sequence
  Synthetic Polynucleotide
gaatgcactttgaaaccga

SEQ ID NO: 6136 - DNA, 19 bp, Artificial Sequence
  Synthetic Polynucleotide
atgattcaatcaccatgcc

SEQ ID NO: 6137 - DNA, 18 bp, Artificial Sequence
  Synthetic Polynucleotide
cgtcatggttactcactc

SEQ ID NO: 6138 - DNA, 19 bp, Artificial Sequence
  Synthetic Polynucleotide
agtcgaatttgatttcgga

SEQ ID NO: 6139 - DNA, 18 bp, Artificial Sequence
  Synthetic Polynucleotide
aacgcttctcaacattct

SEQ ID NO: 6140 - DNA, 18 bp, Artificial Sequence
  Synthetic Polynucleotide
atacactcccacgctcag

SEQ ID NO: 6141 - DNA, 20 bp, Artificial Sequence
  Synthetic Polynucleotide
agacgcaccttgctctttct

SEQ ID NO: 6142 - DNA, 19 bp, Artificial Sequence
  Synthetic Polynucleotide
gtcttccacgctgatcgac

SEQ ID NO: 6143 - DNA, 19 bp, Artificial Sequence
  Synthetic Polynucleotide
tctagacaaaagtggaaga

SEQ ID NO: 6144 - DNA, 19 bp, Artificial Sequence
  Synthetic Polynucleotide
gattttggagtctctgagg

SEQ ID NO: 6145 - DNA, 17 bp, Artificial Sequence
  Synthetic Polynucleotide
actcggctctaatgaca

SEQ ID NO: 6146 - DNA, 20 bp, Artificial Sequence
  Synthetic Polynucleotide
atgacacatctcgaaatagc

SEQ ID NO: 6147 - DNA, 20 bp, Artificial Sequence
  Synthetic Polynucleotide
caactcatttctcaatcccg

SEQ ID NO: 6148 - DNA, 18 bp, Artificial Sequence
  Synthetic Polynucleotide
gacaagctagaatggtca

SEQ ID NO: 6149 - DNA, 18 bp, Artificial Sequence
  Synthetic Polynucleotide
gaataggcatttctgcaa

SEQ ID NO: 6150 - DNA, 20 bp, Artificial Sequence
  Synthetic Polynucleotide
aatgatgcaatgaaggagat

SEQ ID NO: 6151 - DNA, 19 bp, Artificial Sequence
  Synthetic Polynucleotide
tgttacaaagaagaagcac

SEQ ID NO: 6152 - DNA, 19 bp, Artificial Sequence
  Synthetic Polynucleotide
tgacataatcctttggtcg

SEQ ID NO: 6153 - DNA, 17 bp, Artificial Sequence
  Synthetic Polynucleotide
cccgacatggaactcga

SEQ ID NO: 6154 - DNA, 20 bp, Artificial Sequence
  Synthetic Polynucleotide
ttctttccgtacatttacgc

SEQ ID NO: 6155 - DNA, 20 bp, Artificial Sequence
  Synthetic Polynucleotide
ccaataggggtatagaaggg

SEQ ID NO: 6156 - DNA, 20 bp, Artificial Sequence
  Synthetic Polynucleotide
ttcacattcccagttattca

SEQ ID NO: 6157 - DNA, 17 bp, Artificial Sequence
  Synthetic Polynucleotide
tggggcagttcacaact

SEQ ID NO: 6158 - DNA, 17 bp, Artificial Sequence
  Synthetic Polynucleotide
ggtgttgtaagtaccga

SEQ ID NO: 6159 - DNA, 20 bp, Artificial Sequence
  Synthetic Polynucleotide
catttctcagtttggtgaat

SEQ ID NO: 6160 - DNA, 17 bp, Artificial Sequence
  Synthetic Polynucleotide
ggaacactatgctcgcc

SEQ ID NO: 6161 - DNA, 18 bp, Artificial Sequence
  Synthetic Polynucleotide
catgggactacctcaagg

SEQ ID NO: 6162 - DNA, 19 bp, Artificial Sequence
  Synthetic Polynucleotide
cctttctcattccagaaag

SEQ ID NO: 6163 - DNA, 18 bp, Artificial Sequence
  Synthetic Polynucleotide
gtatcttcacaatcacgg

SEQ ID NO: 6164 - DNA, 17 bp, Artificial Sequence
  Synthetic Polynucleotide
gtgccaatgacaggaag

SEQ ID NO: 6165 - DNA, 17 bp, Artificial Sequence
  Synthetic Polynucleotide
aaatcgttagccaccta

SEQ ID NO: 6166 - DNA, 19 bp, Artificial Sequence
  Synthetic Polynucleotide
ggagttttacttggtcaag

SEQ ID NO: 6167 - DNA, 18 bp, Artificial Sequence
  Synthetic Polynucleotide
acgctacatggtctttat

SEQ ID NO: 6168 - DNA, 17 bp, Artificial Sequence
  Synthetic Polynucleotide
gttggttctccttggtc

SEQ ID NO: 6169 - DNA, 19 bp, Artificial Sequence
  Synthetic Polynucleotide
tgtgcttggttggtaaaga

SEQ ID NO: 6170 - DNA, 20 bp, Artificial Sequence
  Synthetic Polynucleotide
aatacttcctgttcctcccc

SEQ ID NO: 6171 - DNA, 18 bp, Artificial Sequence
  Synthetic Polynucleotide
cctagagggtgggtgctg

SEQ ID NO: 6172 - DNA, 18 bp, Artificial Sequence
  Synthetic Polynucleotide
ccccagttgttgttgatg

SEQ ID NO: 6173 - DNA, 17 bp, Artificial Sequence
  Synthetic Polynucleotide
attggcattgcgattcc

SEQ ID NO: 6174 - DNA, 18 bp, Artificial Sequence
  Synthetic Polynucleotide
cgacaaatgattctcctg

SEQ ID NO: 6175 - DNA, 17 bp, Artificial Sequence
  Synthetic Polynucleotide
gcggcatctgatttggt

SEQ ID NO: 6176 - DNA, 19 bp, Artificial Sequence
  Synthetic Polynucleotide
caagtactcagcatgtata

SEQ ID NO: 6177 - DNA, 19 bp, Artificial Sequence
  Synthetic Polynucleotide
aggtcaaaggtcagtagac

SEQ ID NO: 6178 - DNA, 20 bp, Artificial Sequence
  Synthetic Polynucleotide
ttggtacagtcattaaatgg

SEQ ID NO: 6179 - DNA, 17 bp, Artificial Sequence
  Synthetic Polynucleotide
tggagtagatggttggt

SEQ ID NO: 6180 - DNA, 20 bp, Artificial Sequence
  Synthetic Polynucleotide
aatttgttccactcgtacag

SEQ ID NO: 6181 - DNA, 17 bp, Artificial Sequence
  Synthetic Polynucleotide
ctgcctggaatttctga

SEQ ID NO: 6182 - DNA, 20 bp, Artificial Sequence
  Synthetic Polynucleotide
ttattctcaaaagctctgca

SEQ ID NO: 6183 - DNA, 20 bp, Artificial Sequence
  Synthetic Polynucleotide
attccctgtcagttatcaac

SEQ ID NO: 6184 - DNA, 19 bp, Artificial Sequence
  Synthetic Polynucleotide
caagtagagtcgtagctct

SEQ ID NO: 6185 - DNA, 19 bp, Artificial Sequence
  Synthetic Polynucleotide
cttggtcctacgtcatcaa

SEQ ID NO: 6186 - DNA, 19 bp, Artificial Sequence
  Synthetic Polynucleotide
gtctctgaaagatgatacg

SEQ ID NO: 6187 - DNA, 19 bp, Artificial Sequence
  Synthetic Polynucleotide
tttgggtaaaatcaccaaa

SEQ ID NO: 6188 - DNA, 18 bp, Artificial Sequence
  Synthetic Polynucleotide
ctgttcccgtcaatcacg

SEQ ID NO: 6189 - DNA, 17 bp, Artificial Sequence
  Synthetic Polynucleotide
gcggtcccagatcaagg

SEQ ID NO: 6190 - DNA, 17 bp, Artificial Sequence
  Synthetic Polynucleotide
agggttcgttcgttcga

SEQ ID NO: 6191 - DNA, 19 bp, Artificial Sequence
  Synthetic Polynucleotide
gcatgttcgctcattcaca

SEQ ID NO: 6192 - DNA, 17 bp, Artificial Sequence
  Synthetic Polynucleotide
atcactagcagcaagtc

SEQ ID NO: 6193 - DNA, 20 bp, Artificial Sequence
  Synthetic Polynucleotide
caggatatagtgaaatacgg

SEQ ID NO: 6194 - DNA, 20 bp, Artificial Sequence
  Synthetic Polynucleotide
tcgttccattcttcttttaa

SEQ ID NO: 6195 - DNA, 19 bp, Artificial Sequence
  Synthetic Polynucleotide
accagtgtcacaatttaac

SEQ ID NO: 6196 - DNA, 19 bp, Artificial Sequence
  Synthetic Polynucleotide
cgtcttccatgtgataatt

SEQ ID NO: 6197 - DNA, 19 bp, Artificial Sequence
  Synthetic Polynucleotide
gaactcaggtatgttgttc

SEQ ID NO: 6198 - DNA, 17 bp, Artificial Sequence
  Synthetic Polynucleotide
gtgtgtatactggggcg

SEQ ID NO: 6199 - DNA, 20 bp, Artificial Sequence
  Synthetic Polynucleotide
gtgacatcaccaacttcgat

SEQ ID NO: 6200 - DNA, 20 bp, Artificial Sequence
  Synthetic Polynucleotide
ttgttaagtaagtgtgcagt

SEQ ID NO: 6201 - DNA, 18 bp, Artificial Sequence
  Synthetic Polynucleotide
taagttctccatttccct

SEQ ID NO: 6202 - DNA, 18 bp, Artificial Sequence
  Synthetic Polynucleotide
tcctttgatccaggttac

SEQ ID NO: 6203 - DNA, 18 bp, Artificial Sequence
  Synthetic Polynucleotide
acacaggaggaaacagca

SEQ ID NO: 6204 - DNA, 20 bp, Artificial Sequence
  Synthetic Polynucleotide
tgcagtagcctaaattaaca

SEQ ID NO: 6205 - DNA, 19 bp, Artificial Sequence
  Synthetic Polynucleotide
ctgactcactctgttcgta

SEQ ID NO: 6206 - DNA, 18 bp, Artificial Sequence
  Synthetic Polynucleotide
gtttcttggatttcccac

SEQ ID NO: 6207 - DNA, 19 bp, Artificial Sequence
  Synthetic Polynucleotide
atattaatgaggtggcgaa

SEQ ID NO: 6208 - DNA, 20 bp, Artificial Sequence
  Synthetic Polynucleotide
gtctctcaagtgaactggtt

SEQ ID NO: 6209 - DNA, 20 bp, Artificial Sequence
  Synthetic Polynucleotide
ctaaggttagcttttgactc

SEQ ID NO: 6210 - DNA, 18 bp, Artificial Sequence
  Synthetic Polynucleotide
gtgacttttgtctggttc

SEQ ID NO: 6211 - DNA, 18 bp, Artificial Sequence
  Synthetic Polynucleotide
gaactatatggacagggc

SEQ ID NO: 6212 - DNA, 18 bp, Artificial Sequence
  Synthetic Polynucleotide
gatatcagcgagcttggc

SEQ ID NO: 6213 - DNA, 17 bp, Artificial Sequence
  Synthetic Polynucleotide
actctactcaacgagga

SEQ ID NO: 6214 - DNA, 19 bp, Artificial Sequence
  Synthetic Polynucleotide
atgcgtattttcttggttt

SEQ ID NO: 6215 - DNA, 17 bp, Artificial Sequence
  Synthetic Polynucleotide
cggtaggcgagttaaaa

SEQ ID NO: 6216 - DNA, 20 bp, Artificial Sequence
  Synthetic Polynucleotide
tcgatttccattgcttccat

SEQ ID NO: 6217 - DNA, 19 bp, Artificial Sequence
  Synthetic Polynucleotide
gaaacagtaatgacagggg

SEQ ID NO: 6218 - DNA, 20 bp, Artificial Sequence
  Synthetic Polynucleotide
aaattgtacggtcaagatct

SEQ ID NO: 6219 - DNA, 19 bp, Artificial Sequence
  Synthetic Polynucleotide
aaatcttgacactctggtt

SEQ ID NO: 6220 - DNA, 18 bp, Artificial Sequence
  Synthetic Polynucleotide
aaatttccccgaatttcc

SEQ ID NO: 6221 - DNA, 18 bp, Artificial Sequence
  Synthetic Polynucleotide
caggttcgggtgctaatg

SEQ ID NO: 6222 - DNA, 18 bp, Artificial Sequence
  Synthetic Polynucleotide
cttcttcaaccagacccc

SEQ ID NO: 6223 - DNA, 19 bp, Artificial Sequence
  Synthetic Polynucleotide
cgatcaggtactcgtgggg

SEQ ID NO: 6224 - DNA, 20 bp, Artificial Sequence
  Synthetic Polynucleotide
gccattgtgattgttggata

SEQ ID NO: 6225 - DNA, 19 bp, Artificial Sequence
  Synthetic Polynucleotide
aacatttagtgttccgtta

SEQ ID NO: 6226 - DNA, 18 bp, Artificial Sequence
  Synthetic Polynucleotide
ctctctctttctcactgg

SEQ ID NO: 6227 - DNA, 17 bp, Artificial Sequence
  Synthetic Polynucleotide
ggtgacttcggctacag

SEQ ID NO: 6228 - DNA, 17 bp, Artificial Sequence
  Synthetic Polynucleotide
cccaaagtagtcggttc

SEQ ID NO: 6229 - DNA, 17 bp, Artificial Sequence
  Synthetic Polynucleotide
cccctgaatgcggctaa

SEQ ID NO: 6230 - DNA, 18 bp, Artificial Sequence
  Synthetic Polynucleotide
cgcaggtaaagtgatctg

SEQ ID NO: 6231 - DNA, 17 bp, Artificial Sequence
  Synthetic Polynucleotide
atcctctcctttgcacg

SEQ ID NO: 6232 - DNA, 18 bp, Artificial Sequence
  Synthetic Polynucleotide
aaaacctaaatgcccctg

SEQ ID NO: 6233 - DNA, 17 bp, Artificial Sequence
  Synthetic Polynucleotide
gatagggtaacagcggc

SEQ ID NO: 6234 - DNA, 20 bp, Artificial Sequence
  Synthetic Polynucleotide
agagcatgtcctgtcctttt

SEQ ID NO: 6235 - DNA, 17 bp, Artificial Sequence
  Synthetic Polynucleotide
gtcttcagtttcggagc

SEQ ID NO: 6236 - DNA, 19 bp, Artificial Sequence
  Synthetic Polynucleotide
cttttacattttcccatgc

SEQ ID NO: 6237 - DNA, 18 bp, Artificial Sequence
  Synthetic Polynucleotide
catcaatggctcaaaccc

SEQ ID NO: 6238 - DNA, 18 bp, Artificial Sequence
  Synthetic Polynucleotide
agactccttctctcaaca

SEQ ID NO: 6239 - DNA, 18 bp, Artificial Sequence
  Synthetic Polynucleotide
cgagtcccacacactata

SEQ ID NO: 6240 - DNA, 19 bp, Artificial Sequence
  Synthetic Polynucleotide
cacccaaagtagtcggttc

SEQ ID NO: 6241 - DNA, 18 bp, Artificial Sequence
  Synthetic Polynucleotide
agatcaggtcgatgagtc

SEQ ID NO: 6242 - DNA, 19 bp, Artificial Sequence
  Synthetic Polynucleotide
ttcacagcagtagatggtg

SEQ ID NO: 6243 - DNA, 18 bp, Artificial Sequence
  Synthetic Polynucleotide
agcccagcgttaatagcg

SEQ ID NO: 6244 - DNA, 17 bp, Artificial Sequence
  Synthetic Polynucleotide
tggcccactagacgttt

SEQ ID NO: 6245 - DNA, 19 bp, Artificial Sequence
  Synthetic Polynucleotide
caaacactagttgtaaggc

SEQ ID NO: 6246 - DNA, 18 bp, Artificial Sequence
  Synthetic Polynucleotide
gctcaaagtccatgacgg

SEQ ID NO: 6247 - DNA, 20 bp, Artificial Sequence
  Synthetic Polynucleotide
tgctaactaaatccctagca

SEQ ID NO: 6248 - DNA, 17 bp, Artificial Sequence
  Synthetic Polynucleotide
acctggaggtagaacgt

SEQ ID NO: 6249 - DNA, 20 bp, Artificial Sequence
  Synthetic Polynucleotide
tctatgattctgatgtccaa

SEQ ID NO: 6250 - DNA, 18 bp, Artificial Sequence
  Synthetic Polynucleotide
gaattctttccctcagcc

SEQ ID NO: 6251 - DNA, 18 bp, Artificial Sequence
  Synthetic Polynucleotide
atctttcccatccttgtc

SEQ ID NO: 6252 - DNA, 20 bp, Artificial Sequence
  Synthetic Polynucleotide
gccaaattcaatcaaatcaa

SEQ ID NO: 6253 - DNA, 17 bp, Artificial Sequence
  Synthetic Polynucleotide
gaatcaatggcgagtgt

SEQ ID NO: 6254 - DNA, 18 bp, Artificial Sequence
  Synthetic Polynucleotide
cgaaagtagtctgttccg

SEQ ID NO: 6255 - DNA, 17 bp, Artificial Sequence
  Synthetic Polynucleotide
acggtcaagcacttctg

SEQ ID NO: 6256 - DNA, 18 bp, Artificial Sequence
  Synthetic Polynucleotide
accaagtttcttccacta

SEQ ID NO: 6257 - DNA, 18 bp, Artificial Sequence
  Synthetic Polynucleotide
tgctatcccatgatagtc

SEQ ID NO: 6258 - DNA, 17 bp, Artificial Sequence
  Synthetic Polynucleotide
acgacgtagcaacactg

SEQ ID NO: 6259 - DNA, 20 bp, Artificial Sequence
  Synthetic Polynucleotide
tttgtacgcctgttttcccc

SEQ ID NO: 6260 - DNA, 17 bp, Artificial Sequence
  Synthetic Polynucleotide
aacacggacacccaaag

SEQ ID NO: 6261 - DNA, 17 bp, Artificial Sequence
  Synthetic Polynucleotide
cccctgaatgcggctaa

SEQ ID NO: 6262 - DNA, 19 bp, Artificial Sequence
  Synthetic Polynucleotide
ccattgtcagtaccaatct

SEQ ID NO: 6263 - DNA, 20 bp, Artificial Sequence
  Synthetic Polynucleotide
cgaaagcaatccattcttaa

SEQ ID NO: 6264 - DNA, 19 bp, Artificial Sequence
  Synthetic Polynucleotide
tggacaacactcttcatca

SEQ ID NO: 6265 - DNA, 17 bp, Artificial Sequence
  Synthetic Polynucleotide
tggctggctcaagaaat

SEQ ID NO: 6266 - DNA, 20 bp, Artificial Sequence
  Synthetic Polynucleotide
aacacggacacccaaagtag

SEQ ID NO: 6267 - DNA, 20 bp, Artificial Sequence
  Synthetic Polynucleotide
ccctgaatgtggctaacctt

SEQ ID NO: 6268 - DNA, 20 bp, Artificial Sequence
  Synthetic Polynucleotide
gtctggcataactgggaatc

SEQ ID NO: 6269 - DNA, 17 bp, Artificial Sequence
  Synthetic Polynucleotide
accaggtccctcatgtg

SEQ ID NO: 6270 - DNA, 19 bp, Artificial Sequence
  Synthetic Polynucleotide
ttctgtcctaaatcatcca

SEQ ID NO: 6271 - DNA, 20 bp, Artificial Sequence
  Synthetic Polynucleotide
ctgtatggtatagttacagc

SEQ ID NO: 6272 - DNA, 17 bp, Artificial Sequence
  Synthetic Polynucleotide
gcacgataaaaggagca

SEQ ID NO: 6273 - DNA, 17 bp, Artificial Sequence
  Synthetic Polynucleotide
cttccattgacggcttc

SEQ ID NO: 6274 - DNA, 18 bp, Artificial Sequence
  Synthetic Polynucleotide
agcttcatcatcttccac

SEQ ID NO: 6275 - DNA, 19 bp, Artificial Sequence
  Synthetic Polynucleotide
tggtagtttatgaacccaa

SEQ ID NO: 6276 - DNA, 19 bp, Artificial Sequence
  Synthetic Polynucleotide
gacaagtaagtcatctcca

SEQ ID NO: 6277 - DNA, 17 bp, Artificial Sequence
  Synthetic Polynucleotide
ctcactcaaaccccaag

SEQ ID NO: 6278 - DNA, 18 bp, Artificial Sequence
  Synthetic Polynucleotide
acatctctcagctcgaac

SEQ ID NO: 6279 - DNA, 20 bp, Artificial Sequence
  Synthetic Polynucleotide
ccctagtggctcaatcacca

SEQ ID NO: 6280 - DNA, 18 bp, Artificial Sequence
  Synthetic Polynucleotide
ctttatgttcgccctatc

SEQ ID NO: 6281 - DNA, 18 bp, Artificial Sequence
  Synthetic Polynucleotide
actggtcttagcaatacc

SEQ ID NO: 6282 - DNA, 20 bp, Artificial Sequence
  Synthetic Polynucleotide
gctctgatacacagaactct

SEQ ID NO: 6283 - DNA, 19 bp, Artificial Sequence
  Synthetic Polynucleotide
acaagttttcaaaatggca

SEQ ID NO: 6284 - DNA, 20 bp, Artificial Sequence
  Synthetic Polynucleotide
cactttgtggttatagctca

SEQ ID NO: 6285 - DNA, 17 bp, Artificial Sequence
  Synthetic Polynucleotide
gtaaaggtcaaatggcc

SEQ ID NO: 6286 - DNA, 17 bp, Artificial Sequence
  Synthetic Polynucleotide
acgaccagtcttgactc

SEQ ID NO: 6287 - DNA, 20 bp, Artificial Sequence
  Synthetic Polynucleotide
taacgagattatccgtaagc

SEQ ID NO: 6288 - DNA, 18 bp, Artificial Sequence
  Synthetic Polynucleotide
ttcgatttcgtctactgc

SEQ ID NO: 6289 - DNA, 18 bp, Artificial Sequence
  Synthetic Polynucleotide
gctcacgtctgctcagtg

SEQ ID NO: 6290 - DNA, 18 bp, Artificial Sequence
  Synthetic Polynucleotide
tcgaagggaaaaccgtca

SEQ ID NO: 6291 - DNA, 18 bp, Artificial Sequence
  Synthetic Polynucleotide
taccaggaatcagccacg

SEQ ID NO: 6292 - DNA, 19 bp, Artificial Sequence
  Synthetic Polynucleotide
catcgtgtacgttgttgat

SEQ ID NO: 6293 - DNA, 19 bp, Artificial Sequence
  Synthetic Polynucleotide
aggggatgctccagtacgt

SEQ ID NO: 6294 - DNA, 17 bp, Artificial Sequence
  Synthetic Polynucleotide
agcgtttcagctcttgt

SEQ ID NO: 6295 - DNA, 19 bp, Artificial Sequence
  Synthetic Polynucleotide
tggattgataagcgtattg

SEQ ID NO: 6296 - DNA, 19 bp, Artificial Sequence
  Synthetic Polynucleotide
tgaccactattaccaaaga

SEQ ID NO: 6297 - DNA, 18 bp, Artificial Sequence
  Synthetic Polynucleotide
gaaccgcattttggacaa

SEQ ID NO: 6298 - DNA, 18 bp, Artificial Sequence
  Synthetic Polynucleotide
cgagttcaccgacaagaa

SEQ ID NO: 6299 - DNA, 19 bp, Artificial Sequence
  Synthetic Polynucleotide
tacccaagttgaacccacg

SEQ ID NO: 6300 - DNA, 19 bp, Artificial Sequence
  Synthetic Polynucleotide
caatggaatatgcacaaag

SEQ ID NO: 6301 - DNA, 19 bp, Artificial Sequence
  Synthetic Polynucleotide
gctcttttctagcttctct

SEQ ID NO: 6302 - DNA, 19 bp, Artificial Sequence
  Synthetic Polynucleotide
tcatgcaagcaaaatttag

SEQ ID NO: 6303 - DNA, 19 bp, Artificial Sequence
  Synthetic Polynucleotide
ttgtaccatgaccaccctg

SEQ ID NO: 6304 - DNA, 17 bp, Artificial Sequence
  Synthetic Polynucleotide
gatgtagccattcaggg

SEQ ID NO: 6305 - DNA, 17 bp, Artificial Sequence
  Synthetic Polynucleotide
gaacatcattgacctgc

SEQ ID NO: 6306 - DNA, 17 bp, Artificial Sequence
  Synthetic Polynucleotide
ctggatatctgccgcct

SEQ ID NO: 6307 - DNA, 17 bp, Artificial Sequence
  Synthetic Polynucleotide
ccaaacatcgaagccat

SEQ ID NO: 6308 - DNA, 18 bp, Artificial Sequence
  Synthetic Polynucleotide
atgtcattgccatagtta

SEQ ID NO: 6309 - DNA, 19 bp, Artificial Sequence
  Synthetic Polynucleotide
aataccacccactctattg

SEQ ID NO: 6310 - DNA, 19 bp, Artificial Sequence
  Synthetic Polynucleotide
ctttctcacgtagaacctt

SEQ ID NO: 6311 - DNA, 20 bp, Artificial Sequence
  Synthetic Polynucleotide
agattatcctcatgttcgac

SEQ ID NO: 6312 - DNA, 17 bp, Artificial Sequence
  Synthetic Polynucleotide
tttgtttcaccgcccaa

SEQ ID NO: 6313 - DNA, 18 bp, Artificial Sequence
  Synthetic Polynucleotide
tcctcagttacaggaatg

SEQ ID NO: 6314 - DNA, 19 bp, Artificial Sequence
  Synthetic Polynucleotide
caatgcctttccgcacctt

SEQ ID NO: 6315 - DNA, 20 bp, Artificial Sequence
  Synthetic Polynucleotide
gttgaatccgtcctcctacg

SEQ ID NO: 6316 - DNA, 17 bp, Artificial Sequence
  Synthetic Polynucleotide
ggagcataatacgggta

SEQ ID NO: 6317 - DNA, 18 bp, Artificial Sequence
  Synthetic Polynucleotide
gctatttgcggaatgctt

SEQ ID NO: 6318 - DNA, 19 bp, Artificial Sequence
  Synthetic Polynucleotide
ttacgcttgctgggctact

SEQ ID NO: 6319 - DNA, 17 bp, Artificial Sequence
  Synthetic Polynucleotide
ggacagctcaatggcat

SEQ ID NO: 6320 - DNA, 20 bp, Artificial Sequence
  Synthetic Polynucleotide
ctggtcttctggagttgggt

SEQ ID NO: 6321 - DNA, 18 bp, Artificial Sequence
  Synthetic Polynucleotide
gatcccaatcgttctgac

SEQ ID NO: 6322 - DNA, 20 bp, Artificial Sequence
  Synthetic Polynucleotide
taattgtctggctaaatttc

SEQ ID NO: 6323 - DNA, 20 bp, Artificial Sequence
  Synthetic Polynucleotide
tcaaaagtgcaatcaggata

SEQ ID NO: 6324 - DNA, 18 bp, Artificial Sequence
  Synthetic Polynucleotide
tcaggtacaaggtaacct

SEQ ID NO: 6325 - DNA, 19 bp, Artificial Sequence
  Synthetic Polynucleotide
tgcgactgtagactttgaa

SEQ ID NO: 6326 - DNA, 17 bp, Artificial Sequence
  Synthetic Polynucleotide
cacatcggtactcttgc

SEQ ID NO: 6327 - DNA, 18 bp, Artificial Sequence
  Synthetic Polynucleotide
cagggtatgtgggtggtg

SEQ ID NO: 6328 - DNA, 19 bp, Artificial Sequence
  Synthetic Polynucleotide
gttcgaggactaattacct

SEQ ID NO: 6329 - DNA, 20 bp, Artificial Sequence
  Synthetic Polynucleotide
agactgagacttcgtcaacc

SEQ ID NO: 6330 - DNA, 17 bp, Artificial Sequence
  Synthetic Polynucleotide
actgaggacaagactgc

SEQ ID NO: 6331 - DNA, 17 bp, Artificial Sequence
  Synthetic Polynucleotide
aggcttccactcttggt

SEQ ID NO: 6332 - DNA, 20 bp, Artificial Sequence
  Synthetic Polynucleotide
gatcaccttcttctccttca

SEQ ID NO: 6333 - DNA, 20 bp, Artificial Sequence
  Synthetic Polynucleotide
agaagttcgactacaacctc

SEQ ID NO: 6334 - DNA, 19 bp, Artificial Sequence
  Synthetic Polynucleotide
ggttaggaacatcggggta

SEQ ID NO: 6335 - DNA, 17 bp, Artificial Sequence
  Synthetic Polynucleotide
caacggcctaaacgccc

SEQ ID NO: 6336 - DNA, 17 bp, Artificial Sequence
  Synthetic Polynucleotide
ctaagctaggggctaac

SEQ ID NO: 6337 - DNA, 20 bp, Artificial Sequence
  Synthetic Polynucleotide
atctctctcaacatcttagc

SEQ ID NO: 6338 - DNA, 18 bp, Artificial Sequence
  Synthetic Polynucleotide
tatcgtttctcctaaacc

SEQ ID NO: 6339 - DNA, 20 bp, Artificial Sequence
  Synthetic Polynucleotide
ttactttatcaccttctgcc

SEQ ID NO: 6340 - DNA, 18 bp, Artificial Sequence
  Synthetic Polynucleotide
gaggatcttcgctttgct

SEQ ID NO: 6341 - DNA, 18 bp, Artificial Sequence
  Synthetic Polynucleotide
catggcttcgtgacatgc

SEQ ID NO: 6342 - DNA, 17 bp, Artificial Sequence
  Synthetic Polynucleotide
gtaggggactgctttgg

SEQ ID NO: 6343 - DNA, 19 bp, Artificial Sequence
  Synthetic Polynucleotide
ccggtttataatggacaaa

SEQ ID NO: 6344 - DNA, 18 bp, Artificial Sequence
  Synthetic Polynucleotide
tcaccaattaacggtagc

SEQ ID NO: 6345 - DNA, 20 bp, Artificial Sequence
  Synthetic Polynucleotide
gcggtatactcaatggtatt

SEQ ID NO: 6346 - DNA, 17 bp, Artificial Sequence
  Synthetic Polynucleotide
cccattttcttcacgcc

SEQ ID NO: 6347 - DNA, 18 bp, Artificial Sequence
  Synthetic Polynucleotide
acacctgccgcttaacct

SEQ ID NO: 6348 - DNA, 19 bp, Artificial Sequence
  Synthetic Polynucleotide
gttgcgtcatagtgcttta

SEQ ID NO: 6349 - DNA, 18 bp, Artificial Sequence
  Synthetic Polynucleotide
gctttaagaatcggagtc

SEQ ID NO: 6350 - DNA, 18 bp, Artificial Sequence
  Synthetic Polynucleotide
cttgccatagaggctatt

SEQ ID NO: 6351 - DNA, 19 bp, Artificial Sequence
  Synthetic Polynucleotide
taagccattgagaatttgc

SEQ ID NO: 6352 - DNA, 20 bp, Artificial Sequence
  Synthetic Polynucleotide
aaataatgctgtgaagcggg

SEQ ID NO: 6353 - DNA, 20 bp, Artificial Sequence
  Synthetic Polynucleotide
cctttctcaatcctttccta

SEQ ID NO: 6354 - DNA, 17 bp, Artificial Sequence
  Synthetic Polynucleotide
agacgaatccaacgagc

SEQ ID NO: 6355 - DNA, 17 bp, Artificial Sequence
  Synthetic Polynucleotide
cgtggctgtggtatttt

SEQ ID NO: 6356 - DNA, 19 bp, Artificial Sequence
  Synthetic Polynucleotide
gtggctgtggtattttata

SEQ ID NO: 6357 - DNA, 17 bp, Artificial Sequence
  Synthetic Polynucleotide
gtgacgaatccaacgag

SEQ ID NO: 6358 - DNA, 20 bp, Artificial Sequence
  Synthetic Polynucleotide
aggttgtagatcagtattcc

SEQ ID NO: 6359 - DNA, 20 bp, Artificial Sequence
  Synthetic Polynucleotide
gagacctcaaatactgtcag

SEQ ID NO: 6360 - DNA, 20 bp, Artificial Sequence
  Synthetic Polynucleotide
caagtacgttccaaaattgt

SEQ ID NO: 6361 - DNA, 20 bp, Artificial Sequence
  Synthetic Polynucleotide
ccacgttcataagactatta

SEQ ID NO: 6362 - DNA, 19 bp, Artificial Sequence
  Synthetic Polynucleotide
ttcatcctctagtcgagat

SEQ ID NO: 6363 - DNA, 19 bp, Artificial Sequence
  Synthetic Polynucleotide
tttcatcgcaattagtgaa

SEQ ID NO: 6364 - DNA, 19 bp, Artificial Sequence
  Synthetic Polynucleotide
tatatcgtatgagctgaga

SEQ ID NO: 6365 - DNA, 18 bp, Artificial Sequence
  Synthetic Polynucleotide
agcatagtggtcattgaa

SEQ ID NO: 6366 - DNA, 18 bp, Artificial Sequence
  Synthetic Polynucleotide
cataagctaaggtgggat

SEQ ID NO: 6367 - DNA, 17 bp, Artificial Sequence
  Synthetic Polynucleotide
aacaacttccgtgtccc

SEQ ID NO: 6368 - DNA, 17 bp, Artificial Sequence
  Synthetic Polynucleotide
agacaaatccaacgagc

SEQ ID NO: 6369 - DNA, 20 bp, Artificial Sequence
  Synthetic Polynucleotide
agcatataggactagctata

SEQ ID NO: 6370 - DNA, 17 bp, Artificial Sequence
  Synthetic Polynucleotide
acaatgtggcgggtgtg

SEQ ID NO: 6371 - DNA, 19 bp, Artificial Sequence
  Synthetic Polynucleotide
tcactatttcagtttcaga

SEQ ID NO: 6372 - DNA, 17 bp, Artificial Sequence
  Synthetic Polynucleotide
tggttttgatcgcatca

SEQ ID NO: 6373 - DNA, 20 bp, Artificial Sequence
  Synthetic Polynucleotide
tcgtatctaatattggcttg

SEQ ID NO: 6374 - DNA, 20 bp, Artificial Sequence
  Synthetic Polynucleotide
gtggtaaaagcactttgatt

SEQ ID NO: 6375 - DNA, 19 bp, Artificial Sequence
  Synthetic Polynucleotide
tgtggagaaggcaggtaag

SEQ ID NO: 6376 - DNA, 19 bp, Artificial Sequence
  Synthetic Polynucleotide
ttcacttctccatgagatt

SEQ ID NO: 6377 - DNA, 18 bp, Artificial Sequence
  Synthetic Polynucleotide
aagaaaactctgggtgat

SEQ ID NO: 6378 - DNA, 19 bp, Artificial Sequence
  Synthetic Polynucleotide
aggtcccaggaataaatga

SEQ ID NO: 6379 - DNA, 18 bp, Artificial Sequence
  Synthetic Polynucleotide
atggggtaaaacttgacc

SEQ ID NO: 6380 - DNA, 20 bp, Artificial Sequence
  Synthetic Polynucleotide
tatgtctaaacatcagtcat

SEQ ID NO: 6381 - DNA, 20 bp, Artificial Sequence
  Synthetic Polynucleotide
ccgtgtttctgtgattaact

SEQ ID NO: 6382 - DNA, 18 bp, Artificial Sequence
  Synthetic Polynucleotide
aagttcgcacttgttctg

SEQ ID NO: 6383 - DNA, 17 bp, Artificial Sequence
  Synthetic Polynucleotide
tggactctcactcgaac

SEQ ID NO: 6384 - DNA, 19 bp, Artificial Sequence
  Synthetic Polynucleotide
tataaaataccacagccac

SEQ ID NO: 6385 - DNA, 18 bp, Artificial Sequence
  Synthetic Polynucleotide
aaagccatgcagcaaatc

SEQ ID NO: 6386 - DNA, 18 bp, Artificial Sequence
  Synthetic Polynucleotide
cagcttgtctacgtgata

SEQ ID NO: 6387 - DNA, 19 bp, Artificial Sequence
  Synthetic Polynucleotide
acattcatgcaaattacgt

SEQ ID NO: 6388 - DNA, 17 bp, Artificial Sequence
  Synthetic Polynucleotide
gccttacccactcacca

SEQ ID NO: 6389 - DNA, 17 bp, Artificial Sequence
  Synthetic Polynucleotide
ctaaacagtcgcacaac

SEQ ID NO: 6390 - DNA, 17 bp, Artificial Sequence
  Synthetic Polynucleotide
caacgctactcagaggc

SEQ ID NO: 6391 - DNA, 18 bp, Artificial Sequence
  Synthetic Polynucleotide
tagaggtttacggcaacc

SEQ ID NO: 6392 - DNA, 19 bp, Artificial Sequence
  Synthetic Polynucleotide
ccgctagaaaagagatcta

SEQ ID NO: 6393 - DNA, 19 bp, Artificial Sequence
  Synthetic Polynucleotide
tttgtccccaaaggaggaa

SEQ ID NO: 6394 - DNA, 19 bp, Artificial Sequence
  Synthetic Polynucleotide
tgcatacgatcttactcta

SEQ ID NO: 6395 - DNA, 18 bp, Artificial Sequence
  Synthetic Polynucleotide
cacgaccaatacatgatg

SEQ ID NO: 6396 - DNA, 17 bp, Artificial Sequence
  Synthetic Polynucleotide
tccatgaaatatccgcc

SEQ ID NO: 6397 - DNA, 18 bp, Artificial Sequence
  Synthetic Polynucleotide
tgacggatacttatgctt

SEQ ID NO: 6398 - DNA, 19 bp, Artificial Sequence
  Synthetic Polynucleotide
tagatccacaagtcccatt

SEQ ID NO: 6399 - DNA, 18 bp, Artificial Sequence
  Synthetic Polynucleotide
aagaaaattgtcgccttt

SEQ ID NO: 6400 - DNA, 18 bp, Artificial Sequence
  Synthetic Polynucleotide
tgctcgaatctcgacggg

SEQ ID NO: 6401 - DNA, 20 bp, Artificial Sequence
  Synthetic Polynucleotide
tgtgtatattccatctccac

SEQ ID NO: 6402 - DNA, 20 bp, Artificial Sequence
  Synthetic Polynucleotide
acaacgattaaccgcaaagc

SEQ ID NO: 6403 - DNA, 17 bp, Artificial Sequence
  Synthetic Polynucleotide
agttatggtttcgaccg

SEQ ID NO: 6404 - DNA, 17 bp, Artificial Sequence
  Synthetic Polynucleotide
tgttcttctcgctgacg

SEQ ID NO: 6405 - DNA, 17 bp, Artificial Sequence
  Synthetic Polynucleotide
gctggacactcatcgtg

SEQ ID NO: 6406 - DNA, 20 bp, Artificial Sequence
  Synthetic Polynucleotide
tagagttttcacattcagta

SEQ ID NO: 6407 - DNA, 18 bp, Artificial Sequence
  Synthetic Polynucleotide
ttacagctcataacggct

SEQ ID NO: 6408 - DNA, 19 bp, Artificial Sequence
  Synthetic Polynucleotide
tcaaagttgtactcgattt

SEQ ID NO: 6409 - DNA, 18 bp, Artificial Sequence
  Synthetic Polynucleotide
aggatgtaatgaaccgac

SEQ ID NO: 6410 - DNA, 19 bp, Artificial Sequence
  Synthetic Polynucleotide
catgaggcatatactggag

SEQ ID NO: 6411 - DNA, 19 bp, Artificial Sequence
  Synthetic Polynucleotide
aatctgctagtttgtttcc

SEQ ID NO: 6412 - DNA, 17 bp, Artificial Sequence
  Synthetic Polynucleotide
tcttctccacatacgta

SEQ ID NO: 6413 - DNA, 20 bp, Artificial Sequence
  Synthetic Polynucleotide
gcacatagttatcgttggga

SEQ ID NO: 6414 - DNA, 18 bp, Artificial Sequence
  Synthetic Polynucleotide
tcacccgttttacgcaaa

SEQ ID NO: 6415 - DNA, 18 bp, Artificial Sequence
  Synthetic Polynucleotide
aagctcaccttcatggtt

SEQ ID NO: 6416 - DNA, 20 bp, Artificial Sequence
  Synthetic Polynucleotide
catggctcgtttaacctcgc

SEQ ID NO: 6417 - DNA, 20 bp, Artificial Sequence
  Synthetic Polynucleotide
tagttctgagagaatagcat

SEQ ID NO: 6418 - DNA, 19 bp, Artificial Sequence
  Synthetic Polynucleotide
attttctagagagtaggcc

SEQ ID NO: 6419 - DNA, 19 bp, Artificial Sequence
  Synthetic Polynucleotide
ggcatttgtataagtcaga

SEQ ID NO: 6420 - DNA, 19 bp, Artificial Sequence
  Synthetic Polynucleotide
gctggcattggtcgaaaag

SEQ ID NO: 6421 - DNA, 18 bp, Artificial Sequence
  Synthetic Polynucleotide
ttttgccgttctacatga

SEQ ID NO: 6422 - DNA, 20 bp, Artificial Sequence
  Synthetic Polynucleotide
attagattcttcttcactgc

SEQ ID NO: 6423 - DNA, 20 bp, Artificial Sequence
  Synthetic Polynucleotide
gtatcttccatgtcccgtaa

SEQ ID NO: 6424 - DNA, 19 bp, Artificial Sequence
  Synthetic Polynucleotide
cttacatatggctttggaa

SEQ ID NO: 6425 - DNA, 17 bp, Artificial Sequence
  Synthetic Polynucleotide
tctgctcggtgctaagt

SEQ ID NO: 6426 - DNA, 20 bp, Artificial Sequence
  Synthetic Polynucleotide
atagcagtacactcctagct

SEQ ID NO: 6427 - DNA, 19 bp, Artificial Sequence
  Synthetic Polynucleotide
tgtacccaccacacatttt

SEQ ID NO: 6428 - DNA, 18 bp, Artificial Sequence
  Synthetic Polynucleotide
agattgaaattggttgcc

SEQ ID NO: 6429 - DNA, 19 bp, Artificial Sequence
  Synthetic Polynucleotide
taaaaccctcatcactgaa

SEQ ID NO: 6430 - DNA, 18 bp, Artificial Sequence
  Synthetic Polynucleotide
gggatttgagacaagggc

SEQ ID NO: 6431 - DNA, 18 bp, Artificial Sequence
  Synthetic Polynucleotide
tcgttgttcattttgcag

SEQ ID NO: 6432 - DNA, 20 bp, Artificial Sequence
  Synthetic Polynucleotide
aagactggaattacccacca

SEQ ID NO: 6433 - DNA, 17 bp, Artificial Sequence
  Synthetic Polynucleotide
ccaatcgtctgaattcg

SEQ ID NO: 6434 - DNA, 19 bp, Artificial Sequence
  Synthetic Polynucleotide
cgttcgctttgttctggaa

SEQ ID NO: 6435 - DNA, 20 bp, Artificial Sequence
  Synthetic Polynucleotide
tgcttctgaatttatctcga

SEQ ID NO: 6436 - DNA, 20 bp, Artificial Sequence
  Synthetic Polynucleotide
gtttaaattgatcgttgcaa

SEQ ID NO: 6437 - DNA, 19 bp, Artificial Sequence
  Synthetic Polynucleotide
ttgctttcctttacgcata

SEQ ID NO: 6438 - DNA, 20 bp, Artificial Sequence
  Synthetic Polynucleotide
cggatgcttgttaaggactg

SEQ ID NO: 6439 - DNA, 20 bp, Artificial Sequence
  Synthetic Polynucleotide
ctgtcgttattggatcgtgc

SEQ ID NO: 6440 - DNA, 18 bp, Artificial Sequence
  Synthetic Polynucleotide
ttaccaccttacttcacg

SEQ ID NO: 6441 - DNA, 17 bp, Artificial Sequence
  Synthetic Polynucleotide
tctggttctaggctcgt

SEQ ID NO: 6442 - DNA, 17 bp, Artificial Sequence
  Synthetic Polynucleotide
tttcggaggactttcgt

SEQ ID NO: 6443 - DNA, 18 bp, Artificial Sequence
  Synthetic Polynucleotide
tgaattctgcacagccat

SEQ ID NO: 6444 - DNA, 19 bp, Artificial Sequence
  Synthetic Polynucleotide
tttggcgattcaaactttt

SEQ ID NO: 6445 - DNA, 19 bp, Artificial Sequence
  Synthetic Polynucleotide
gtggctgtggtattttata

SEQ ID NO: 6446 - DNA, 17 bp, Artificial Sequence
  Synthetic Polynucleotide
tgtggcgagtatggcag

SEQ ID NO: 6447 - DNA, 17 bp, Artificial Sequence
  Synthetic Polynucleotide
cgcattggaagcacgtc

SEQ ID NO: 6448 - DNA, 17 bp, Artificial Sequence
  Synthetic Polynucleotide
tgcagtgacacaaaagt

SEQ ID NO: 6449 - DNA, 17 bp, Artificial Sequence
  Synthetic Polynucleotide
ggtattgaaaccctggc

SEQ ID NO: 6450 - DNA, 19 bp, Artificial Sequence
  Synthetic Polynucleotide
gcatctcctacctactttt

SEQ ID NO: 6451 - DNA, 18 bp, Artificial Sequence
  Synthetic Polynucleotide
atcccaccttagcttatg

SEQ ID NO: 6452 - DNA, 20 bp, Artificial Sequence
  Synthetic Polynucleotide
gtggctgtggtattttatat

SEQ ID NO: 6453 - DNA, 20 bp, Artificial Sequence
  Synthetic Polynucleotide
ctctctgaaatggaaaacaa

SEQ ID NO: 6454 - DNA, 17 bp, Artificial Sequence
  Synthetic Polynucleotide
aggtccagaacattcct

SEQ ID NO: 6455 - DNA, 19 bp, Artificial Sequence
  Synthetic Polynucleotide
cgaatcgagtatgggctcg

SEQ ID NO: 6456 - DNA, 18 bp, Artificial Sequence
  Synthetic Polynucleotide
aacggattgcggtacaac

SEQ ID NO: 6457 - DNA, 19 bp, Artificial Sequence
  Synthetic Polynucleotide
gatcaagttcaatcgaacg

SEQ ID NO: 6458 - DNA, 18 bp, Artificial Sequence
  Synthetic Polynucleotide
ccaggtctcattggattc

SEQ ID NO: 6459 - DNA, 19 bp, Artificial Sequence
  Synthetic Polynucleotide
gaaaagttacactccatgg

SEQ ID NO: 6460 - DNA, 20 bp, Artificial Sequence
  Synthetic Polynucleotide
tctgctaaaagttcatgtga

SEQ ID NO: 6461 - DNA, 19 bp, Artificial Sequence
  Synthetic Polynucleotide
agtgagtacatcattccta

SEQ ID NO: 6462 - DNA, 18 bp, Artificial Sequence
  Synthetic Polynucleotide
tggatctagcaaacagtt

SEQ ID NO: 6463 - DNA, 19 bp, Artificial Sequence
  Synthetic Polynucleotide
ctacttacgactctggtca

SEQ ID NO: 6464 - DNA, 19 bp, Artificial Sequence
  Synthetic Polynucleotide
gagaaagtgagcgtcaatt

SEQ ID NO: 6465 - DNA, 20 bp, Artificial Sequence
  Synthetic Polynucleotide
ctctgtgcctaaatatagac

SEQ ID NO: 6466 - DNA, 19 bp, Artificial Sequence
  Synthetic Polynucleotide
caagaagcgaaaagagaac

SEQ ID NO: 6467 - DNA, 20 bp, Artificial Sequence
  Synthetic Polynucleotide
ttttatcaaaagacacgagg

SEQ ID NO: 6468 - DNA, 18 bp, Artificial Sequence
  Synthetic Polynucleotide
acattcctccatcgtcat

SEQ ID NO: 6469 - DNA, 18 bp, Artificial Sequence
  Synthetic Polynucleotide
caattgggcgacaaagct

SEQ ID NO: 6470 - DNA, 18 bp, Artificial Sequence
  Synthetic Polynucleotide
acaatagcatcattcggg

SEQ ID NO: 6471 - DNA, 17 bp, Artificial Sequence
  Synthetic Polynucleotide
cggaaccttacggctgc

SEQ ID NO: 6472 - DNA, 17 bp, Artificial Sequence
  Synthetic Polynucleotide
gctgaaggaaaaccagt

SEQ ID NO: 6473 - DNA, 17 bp, Artificial Sequence
  Synthetic Polynucleotide
gcggatattcggtcaga

SEQ ID NO: 6474 - DNA, 17 bp, Artificial Sequence
  Synthetic Polynucleotide
cctatcccaccttacct

SEQ ID NO: 6475 - DNA, 20 bp, Artificial Sequence
  Synthetic Polynucleotide
cacactgtactaaggatagt

SEQ ID NO: 6476 - DNA, 18 bp, Artificial Sequence
  Synthetic Polynucleotide
taagggaactaagtggat

SEQ ID NO: 6477 - DNA, 19 bp, Artificial Sequence
  Synthetic Polynucleotide
tggacgctactcaagctgt

SEQ ID NO: 6478 - DNA, 17 bp, Artificial Sequence
  Synthetic Polynucleotide
agcaacatccatctcac

SEQ ID NO: 6479 - DNA, 17 bp, Artificial Sequence
  Synthetic Polynucleotide
agtccaacgagcccatg

SEQ ID NO: 6480 - DNA, 20 bp, Artificial Sequence
  Synthetic Polynucleotide
gtggctgtggtattttatat

SEQ ID NO: 6481 - DNA, 20 bp, Artificial Sequence
  Synthetic Polynucleotide
tgtcgcatcttttcggcagt

SEQ ID NO: 6482 - DNA, 17 bp, Artificial Sequence
  Synthetic Polynucleotide
gctaaggtgggatagga

SEQ ID NO: 6483 - DNA, 20 bp, Artificial Sequence
  Synthetic Polynucleotide
ccgttcttaacgtcaaagca

SEQ ID NO: 6484 - DNA, 17 bp, Artificial Sequence
  Synthetic Polynucleotide
aaccattcacgagcaca

SEQ ID NO: 6485 - DNA, 19 bp, Artificial Sequence
  Synthetic Polynucleotide
tccatcgtcaaaggcatct

SEQ ID NO: 6486 - DNA, 18 bp, Artificial Sequence
  Synthetic Polynucleotide
aggtgtttagtaagaccg

SEQ ID NO: 6487 - DNA, 20 bp, Artificial Sequence
  Synthetic Polynucleotide
tcatttactgacaagcatac

SEQ ID NO: 6488 - DNA, 17 bp, Artificial Sequence
  Synthetic Polynucleotide
tcgagttttcaatcacc

SEQ ID NO: 6489 - DNA, 19 bp, Artificial Sequence
  Synthetic Polynucleotide
gcaaggcagaagaaataat

SEQ ID NO: 6490 - DNA, 19 bp, Artificial Sequence
  Synthetic Polynucleotide
acgttttacatttgtggta

SEQ ID NO: 6491 - DNA, 20 bp, Artificial Sequence
  Synthetic Polynucleotide
ccaggtgttaatctttaagg

SEQ ID NO: 6492 - DNA, 18 bp, Artificial Sequence
  Synthetic Polynucleotide
ccgcccgtaatagcagac

SEQ ID NO: 6493 - DNA, 17 bp, Artificial Sequence
  Synthetic Polynucleotide
acatgtcaaccaacgca

SEQ ID NO: 6494 - DNA, 19 bp, Artificial Sequence
  Synthetic Polynucleotide
cttaatggcaacatacaga

SEQ ID NO: 6495 - DNA, 18 bp, Artificial Sequence
  Synthetic Polynucleotide
ctctaattggaaagcacc

SEQ ID NO: 6496 - DNA, 20 bp, Artificial Sequence
  Synthetic Polynucleotide
agagaagatcgcatactaat

SEQ ID NO: 6497 - DNA, 17 bp, Artificial Sequence
  Synthetic Polynucleotide
tgcatctactgaaaccc

SEQ ID NO: 6498 - DNA, 19 bp, Artificial Sequence
  Synthetic Polynucleotide
tgttataagcactctcaga

SEQ ID NO: 6499 - DNA, 18 bp, Artificial Sequence
  Synthetic Polynucleotide
ttcgcatacaagagcttt

SEQ ID NO: 6500 - DNA, 20 bp, Artificial Sequence
  Synthetic Polynucleotide
tctcagaacttgatttggaa

SEQ ID NO: 6501 - DNA, 19 bp, Artificial Sequence
  Synthetic Polynucleotide
ctttcatacttcgaaacca

SEQ ID NO: 6502 - DNA, 18 bp, Artificial Sequence
  Synthetic Polynucleotide
taacattcagaagcccca

SEQ ID NO: 6503 - DNA, 20 bp, Artificial Sequence
  Synthetic Polynucleotide
ttagagcccagagaaggttt

SEQ ID NO: 6504 - DNA, 18 bp, Artificial Sequence
  Synthetic Polynucleotide
gcagcaaaattcccgaat

SEQ ID NO: 6505 - DNA, 19 bp, Artificial Sequence
  Synthetic Polynucleotide
gatcttcttggtcaggaag

SEQ ID NO: 6506 - DNA, 17 bp, Artificial Sequence
  Synthetic Polynucleotide
tatctctcattccacgt

SEQ ID NO: 6507 - DNA, 19 bp, Artificial Sequence
  Synthetic Polynucleotide
atatggtcaaggtgttgaa

SEQ ID NO: 6508 - DNA, 18 bp, Artificial Sequence
  Synthetic Polynucleotide
aagcggtagaaactgaac

SEQ ID NO: 6509 - DNA, 20 bp, Artificial Sequence
  Synthetic Polynucleotide
aagaaatacaagtgttgctg

SEQ ID NO: 6510 - DNA, 20 bp, Artificial Sequence
  Synthetic Polynucleotide
tgaattgtcattgctcccac

SEQ ID NO: 6511 - DNA, 19 bp, Artificial Sequence
  Synthetic Polynucleotide
caccacacaacttagaaac

SEQ ID NO: 6512 - DNA, 18 bp, Artificial Sequence
  Synthetic Polynucleotide
atcgttcgcagatgcagc

SEQ ID NO: 6513 - DNA, 18 bp, Artificial Sequence
  Synthetic Polynucleotide
gaaaacgtaaagcgtcaa

SEQ ID NO: 6514 - DNA, 18 bp, Artificial Sequence
  Synthetic Polynucleotide
acaaagtgatgccctgtt

SEQ ID NO: 6515 - DNA, 20 bp, Artificial Sequence
  Synthetic Polynucleotide
attagaactgattgttgcca

SEQ ID NO: 6516 - DNA, 19 bp, Artificial Sequence
  Synthetic Polynucleotide
ttacctcgccgaaaccctt

SEQ ID NO: 6517 - DNA, 19 bp, Artificial Sequence
  Synthetic Polynucleotide
tgctcaatagaggctatcg

SEQ ID NO: 6518 - DNA, 19 bp, Artificial Sequence
  Synthetic Polynucleotide
gagcggtatcgtctatatt

SEQ ID NO: 6519 - DNA, 20 bp, Artificial Sequence
  Synthetic Polynucleotide
ccagcgtattataacatctc

SEQ ID NO: 6520 - DNA, 18 bp, Artificial Sequence
  Synthetic Polynucleotide
attggtgtcgcatgtcta

SEQ ID NO: 6521 - DNA, 19 bp, Artificial Sequence
  Synthetic Polynucleotide
ttgcacattcctcgtgatg

SEQ ID NO: 6522 - DNA, 18 bp, Artificial Sequence
  Synthetic Polynucleotide
tgctccgtatcatcagag

SEQ ID NO: 6523 - DNA, 20 bp, Artificial Sequence
  Synthetic Polynucleotide
gtccatccgtctcttcgtct

SEQ ID NO: 6524 - DNA, 19 bp, Artificial Sequence
  Synthetic Polynucleotide
gccagtccataataggaat

SEQ ID NO: 6525 - DNA, 20 bp, Artificial Sequence
  Synthetic Polynucleotide
aacccgattgaaaatagttg

SEQ ID NO: 6526 - DNA, 19 bp, Artificial Sequence
  Synthetic Polynucleotide
tattcacagcgtaatttcg

SEQ ID NO: 6527 - DNA, 19 bp, Artificial Sequence
  Synthetic Polynucleotide
ttcattttagcactcgaaa

SEQ ID NO: 6528 - DNA, 18 bp, Artificial Sequence
  Synthetic Polynucleotide
aagacttcgccacattgc

SEQ ID NO: 6529 - DNA, 17 bp, Artificial Sequence
  Synthetic Polynucleotide
gtccgtcaatctccaga

SEQ ID NO: 6530 - DNA, 19 bp, Artificial Sequence
  Synthetic Polynucleotide
gctcccataaggctatcga

SEQ ID NO: 6531 - DNA, 18 bp, Artificial Sequence
  Synthetic Polynucleotide
caggcccgataatttcca

SEQ ID NO: 6532 - DNA, 19 bp, Artificial Sequence
  Synthetic Polynucleotide
gagcttccgatcatctatc

SEQ ID NO: 6533 - DNA, 20 bp, Artificial Sequence
  Synthetic Polynucleotide
gaaacgtcacagtaaagccg

SEQ ID NO: 6534 - DNA, 20 bp, Artificial Sequence
  Synthetic Polynucleotide
ggaagaatacttaagcacaa

SEQ ID NO: 6535 - DNA, 19 bp, Artificial Sequence
  Synthetic Polynucleotide
tgagtacccattatgtagg

SEQ ID NO: 6536 - DNA, 20 bp, Artificial Sequence
  Synthetic Polynucleotide
tcttaacgaaggagcatacg

SEQ ID NO: 6537 - DNA, 20 bp, Artificial Sequence
  Synthetic Polynucleotide
tcggagcagatattcatatg

SEQ ID NO: 6538 - DNA, 17 bp, Artificial Sequence
  Synthetic Polynucleotide
aatgtccccgtgtcatc

SEQ ID NO: 6539 - DNA, 18 bp, Artificial Sequence
  Synthetic Polynucleotide
tccgcttcatcaatatca

SEQ ID NO: 6540 - DNA, 18 bp, Artificial Sequence
  Synthetic Polynucleotide
tatcatagcgaataccgg

SEQ ID NO: 6541 - DNA, 17 bp, Artificial Sequence
  Synthetic Polynucleotide
gattcccgatggagaat

SEQ ID NO: 6542 - DNA, 18 bp, Artificial Sequence
  Synthetic Polynucleotide
gaacatgaactcatcggc

SEQ ID NO: 6543 - DNA, 18 bp, Artificial Sequence
  Synthetic Polynucleotide
gatattttgacctggagc

SEQ ID NO: 6544 - DNA, 18 bp, Artificial Sequence
  Synthetic Polynucleotide
tcgtgaaataattggcat

SEQ ID NO: 6545 - DNA, 20 bp, Artificial Sequence
  Synthetic Polynucleotide
cagttcctctgtcagtttca

SEQ ID NO: 6546 - DNA, 19 bp, Artificial Sequence
  Synthetic Polynucleotide
cagcgacccggcagtatat

SEQ ID NO: 6547 - DNA, 19 bp, Artificial Sequence
  Synthetic Polynucleotide
gtatcccttaacaaccgat

SEQ ID NO: 6548 - DNA, 20 bp, Artificial Sequence
  Synthetic Polynucleotide
tctacagctactaccagtgg

SEQ ID NO: 6549 - DNA, 17 bp, Artificial Sequence
  Synthetic Polynucleotide
ccaacgagcacatatgc

SEQ ID NO: 6550 - DNA, 20 bp, Artificial Sequence
  Synthetic Polynucleotide
acacacacatacacaactaa

SEQ ID NO: 6551 - DNA, 19 bp, Artificial Sequence
  Synthetic Polynucleotide
ctcttttaacgtccataga

SEQ ID NO: 6552 - DNA, 18 bp, Artificial Sequence
  Synthetic Polynucleotide
gagcgtaatgtctctgta

SEQ ID NO: 6553 - DNA, 18 bp, Artificial Sequence
  Synthetic Polynucleotide
ctcccagcctgacctctc

SEQ ID NO: 6554 - DNA, 17 bp, Artificial Sequence
  Synthetic Polynucleotide
aagaaagagttgcagcg

SEQ ID NO: 6555 - DNA, 18 bp, Artificial Sequence
  Synthetic Polynucleotide
aggcataaaatcaccgcg

SEQ ID NO: 6556 - DNA, 20 bp, Artificial Sequence
  Synthetic Polynucleotide
acagtcggcacttttgtggt

SEQ ID NO: 6557 - DNA, 19 bp, Artificial Sequence
  Synthetic Polynucleotide
gttcattcaaccaccaata

SEQ ID NO: 6558 - DNA, 17 bp, Artificial Sequence
  Synthetic Polynucleotide
ccactaagcagtcttgg

SEQ ID NO: 6559 - DNA, 17 bp, Artificial Sequence
  Synthetic Polynucleotide
tcacattatcccaccca

SEQ ID NO: 6560 - DNA, 20 bp, Artificial Sequence
  Synthetic Polynucleotide
gacgaagatcaacaattttg

SEQ ID NO: 6561 - DNA, 20 bp, Artificial Sequence
  Synthetic Polynucleotide
gattcattgaaaggtaacgt

SEQ ID NO: 6562 - DNA, 19 bp, Artificial Sequence
  Synthetic Polynucleotide
atattacttgcagcattgc

SEQ ID NO: 6563 - DNA, 20 bp, Artificial Sequence
  Synthetic Polynucleotide
tgaaaacccaccgaacattt

SEQ ID NO: 6564 - DNA, 19 bp, Artificial Sequence
  Synthetic Polynucleotide
cagccctagatataatcca

SEQ ID NO: 6565 - DNA, 17 bp, Artificial Sequence
  Synthetic Polynucleotide
gagggattgacagtgga

SEQ ID NO: 6566 - DNA, 20 bp, Artificial Sequence
  Synthetic Polynucleotide
aatcactattccgttcatta

SEQ ID NO: 6567 - DNA, 19 bp, Artificial Sequence
  Synthetic Polynucleotide
caatgggagacaacaaatg

SEQ ID NO: 6568 - DNA, 18 bp, Artificial Sequence
  Synthetic Polynucleotide
tgttgcgtttcgaatcta

SEQ ID NO: 6569 - DNA, 20 bp, Artificial Sequence
  Synthetic Polynucleotide
aaacctcaactttcgtcatc

SEQ ID NO: 6570 - DNA, 18 bp, Artificial Sequence
  Synthetic Polynucleotide
attccgagcaccatcttt

SEQ ID NO: 6571 - DNA, 18 bp, Artificial Sequence
  Synthetic Polynucleotide
gcctatcacgggttcaac

SEQ ID NO: 6572 - DNA, 20 bp, Artificial Sequence
  Synthetic Polynucleotide
tgtaattaacattgcgtctt

SEQ ID NO: 6573 - DNA, 20 bp, Artificial Sequence
  Synthetic Polynucleotide
tgcctttctgaaaagacact

SEQ ID NO: 6574 - DNA, 20 bp, Artificial Sequence
  Synthetic Polynucleotide
ttcctgttcttacgggactc

SEQ ID NO: 6575 - DNA, 19 bp, Artificial Sequence
  Synthetic Polynucleotide
gttcatcgggacttggatt

SEQ ID NO: 6576 - DNA, 18 bp, Artificial Sequence
  Synthetic Polynucleotide
tgagaccctaaatgtggc

SEQ ID NO: 6577 - DNA, 20 bp, Artificial Sequence
  Synthetic Polynucleotide
acactttctgtaagtcgttg

SEQ ID NO: 6578 - DNA, 17 bp, Artificial Sequence
  Synthetic Polynucleotide
gctttgagccatgagta

SEQ ID NO: 6579 - DNA, 19 bp, Artificial Sequence
  Synthetic Polynucleotide
aattaacgtcggtcggtca

SEQ ID NO: 6580 - DNA, 19 bp, Artificial Sequence
  Synthetic Polynucleotide
ggaaacttgcatcgtatta

SEQ ID NO: 6581 - DNA, 18 bp, Artificial Sequence
  Synthetic Polynucleotide
gttcaccagattcttcac

SEQ ID NO: 6582 - DNA, 19 bp, Artificial Sequence
  Synthetic Polynucleotide
cgttatttcacactctcat

SEQ ID NO: 6583 - DNA, 20 bp, Artificial Sequence
  Synthetic Polynucleotide
agcgagacttaaccaaatac

SEQ ID NO: 6584 - DNA, 17 bp, Artificial Sequence
  Synthetic Polynucleotide
taatgtgcagccatagc

SEQ ID NO: 6585 - DNA, 20 bp, Artificial Sequence
  Synthetic Polynucleotide
ccatatatcacacttagcac

SEQ ID NO: 6586 - DNA, 17 bp, Artificial Sequence
  Synthetic Polynucleotide
aagttttacattggcgc

SEQ ID NO: 6587 - DNA, 17 bp, Artificial Sequence
  Synthetic Polynucleotide
cagtaggaaggtcaaga

SEQ ID NO: 6588 - DNA, 20 bp, Artificial Sequence
  Synthetic Polynucleotide
tataaatgtttggcgtggat

SEQ ID NO: 6589 - DNA, 18 bp, Artificial Sequence
  Synthetic Polynucleotide
ggcgtttctcttaattgc

SEQ ID NO: 6590 - DNA, 17 bp, Artificial Sequence
  Synthetic Polynucleotide
cttgagaagccttagcg

SEQ ID NO: 6591 - DNA, 18 bp, Artificial Sequence
  Synthetic Polynucleotide
gtcctaattgtagcagcg

SEQ ID NO: 6592 - DNA, 18 bp, Artificial Sequence
  Synthetic Polynucleotide
tcgataaaggtcactaga

SEQ ID NO: 6593 - DNA, 19 bp, Artificial Sequence
  Synthetic Polynucleotide
cctccaattttctaaacca

SEQ ID NO: 6594 - DNA, 20 bp, Artificial Sequence
  Synthetic Polynucleotide
ttgatgagttaaattgggag

SEQ ID NO: 6595 - DNA, 18 bp, Artificial Sequence
  Synthetic Polynucleotide
cagccttagactttccta

SEQ ID NO: 6596 - DNA, 19 bp, Artificial Sequence
  Synthetic Polynucleotide
tttctcaaggggcgaaaca

SEQ ID NO: 6597 - DNA, 20 bp, Artificial Sequence
  Synthetic Polynucleotide
tcggctagacattttatgag

SEQ ID NO: 6598 - DNA, 17 bp, Artificial Sequence
  Synthetic Polynucleotide
gcagaggattccagcaa

SEQ ID NO: 6599 - DNA, 18 bp, Artificial Sequence
  Synthetic Polynucleotide
aatttgtatcggcaaacg

SEQ ID NO: 6600 - DNA, 18 bp, Artificial Sequence
  Synthetic Polynucleotide
cttgtcgggtcaaaatct

SEQ ID NO: 6601 - DNA, 18 bp, Artificial Sequence
  Synthetic Polynucleotide
ttcacagtatgcacatga

SEQ ID NO: 6602 - DNA, 20 bp, Artificial Sequence
  Synthetic Polynucleotide
aacatcttgtcggatcaatc

SEQ ID NO: 6603 - DNA, 18 bp, Artificial Sequence
  Synthetic Polynucleotide
aaccaagtgggcaaataa

SEQ ID NO: 6604 - DNA, 18 bp, Artificial Sequence
  Synthetic Polynucleotide
cacagccacgggaaataa

SEQ ID NO: 6605 - DNA, 20 bp, Artificial Sequence
  Synthetic Polynucleotide
ccctggtaaataacttacgt

SEQ ID NO: 6606 - DNA, 20 bp, Artificial Sequence
  Synthetic Polynucleotide
taatccaacctttctcacgg

SEQ ID NO: 6607 - DNA, 20 bp, Artificial Sequence
  Synthetic Polynucleotide
agcgataattgaattctgac

SEQ ID NO: 6608 - DNA, 17 bp, Artificial Sequence
  Synthetic Polynucleotide
gccagaccatcacgtcg

SEQ ID NO: 6609 - DNA, 17 bp, Artificial Sequence
  Synthetic Polynucleotide
cgatagtcggagaacgc

SEQ ID NO: 6610 - DNA, 20 bp, Artificial Sequence
  Synthetic Polynucleotide
taaggacagcaataactctc

SEQ ID NO: 6611 - DNA, 17 bp, Artificial Sequence
  Synthetic Polynucleotide
tcaatcactcgttcgat

SEQ ID NO: 6612 - DNA, 20 bp, Artificial Sequence
  Synthetic Polynucleotide
tgttcatgctagtacgtaac

SEQ ID NO: 6613 - DNA, 20 bp, Artificial Sequence
  Synthetic Polynucleotide
tactgatagtgagcgatagt

SEQ ID NO: 6614 - DNA, 19 bp, Artificial Sequence
  Synthetic Polynucleotide
tggtatagcaacggcaata

SEQ ID NO: 6615 - DNA, 19 bp, Artificial Sequence
  Synthetic Polynucleotide
atatcaactgctccatagt

SEQ ID NO: 6616 - DNA, 20 bp, Artificial Sequence
  Synthetic Polynucleotide
agaaacagcagtacaatacg

SEQ ID NO: 6617 - DNA, 20 bp, Artificial Sequence
  Synthetic Polynucleotide
ttatgtaaccttcgagcatc

SEQ ID NO: 6618 - DNA, 20 bp, Artificial Sequence
  Synthetic Polynucleotide
tggtaacctatcaacatcac

SEQ ID NO: 6619 - DNA, 20 bp, Artificial Sequence
  Synthetic Polynucleotide
tatcaaagtacaccgtattt

SEQ ID NO: 6620 - DNA, 19 bp, Artificial Sequence
  Synthetic Polynucleotide
tgaggcattttagagatcc

SEQ ID NO: 6621 - DNA, 19 bp, Artificial Sequence
  Synthetic Polynucleotide
ggcacttaacatttcgtaa

SEQ ID NO: 6622 - DNA, 20 bp, Artificial Sequence
  Synthetic Polynucleotide
gacattgttattccatttcg

SEQ ID NO: 6623 - DNA, 17 bp, Artificial Sequence
  Synthetic Polynucleotide
tcttgtttgaggaacgt

SEQ ID NO: 6624 - DNA, 17 bp, Artificial Sequence
  Synthetic Polynucleotide
tccattacattctcgga

SEQ ID NO: 6625 - DNA, 17 bp, Artificial Sequence
  Synthetic Polynucleotide
tactggtcaaggaaggt

SEQ ID NO: 6626 - DNA, 20 bp, Artificial Sequence
  Synthetic Polynucleotide
tccgtaacagtcaatagcct

SEQ ID NO: 6627 - DNA, 20 bp, Artificial Sequence
  Synthetic Polynucleotide
gccatcatttgtgaaaacat

SEQ ID NO: 6628 - DNA, 20 bp, Artificial Sequence
  Synthetic Polynucleotide
ttatgcttggaagtccctag

SEQ ID NO: 6629 - DNA, 17 bp, Artificial Sequence
  Synthetic Polynucleotide
aacacaccgacgctcaa

SEQ ID NO: 6630 - DNA, 19 bp, Artificial Sequence
  Synthetic Polynucleotide
aatcacgaacacgatttat

SEQ ID NO: 6631 - DNA, 20 bp, Artificial Sequence
  Synthetic Polynucleotide
aagtaagatccggctgcaac

SEQ ID NO: 6632 - DNA, 17 bp, Artificial Sequence
  Synthetic Polynucleotide
cgaccgaagtcttttgc

SEQ ID NO: 6633 - DNA, 19 bp, Artificial Sequence
  Synthetic Polynucleotide
caaaacggcaacaattaac

SEQ ID NO: 6634 - DNA, 18 bp, Artificial Sequence
  Synthetic Polynucleotide
tccattgtttcctcgatt

SEQ ID NO: 6635 - DNA, 19 bp, Artificial Sequence
  Synthetic Polynucleotide
acagcaacgtaaagaagct

SEQ ID NO: 6636 - DNA, 18 bp, Artificial Sequence
  Synthetic Polynucleotide
agctgctccctctcgaac

SEQ ID NO: 6637 - DNA, 19 bp, Artificial Sequence
  Synthetic Polynucleotide
gcatttagtatcgacacct

SEQ ID NO: 6638 - DNA, 20 bp, Artificial Sequence
  Synthetic Polynucleotide
catcgccattcaggcacatc

SEQ ID NO: 6639 - DNA, 18 bp, Artificial Sequence
  Synthetic Polynucleotide
tgatcgaagtccaattgc

SEQ ID NO: 6640 - DNA, 18 bp, Artificial Sequence
  Synthetic Polynucleotide
cctgattttcccactaca

SEQ ID NO: 6641 - DNA, 18 bp, Artificial Sequence
  Synthetic Polynucleotide
aggtccgaaggtatgccc

SEQ ID NO: 6642 - DNA, 17 bp, Artificial Sequence
  Synthetic Polynucleotide
gtcgccatctccattct

SEQ ID NO: 6643 - DNA, 17 bp, Artificial Sequence
  Synthetic Polynucleotide
aagcacacacttctgat

SEQ ID NO: 6644 - DNA, 20 bp, Artificial Sequence
  Synthetic Polynucleotide
ataaaggggtagtacgcacg

SEQ ID NO: 6645 - DNA, 20 bp, Artificial Sequence
  Synthetic Polynucleotide
ttagtatcgaatccaaccgt

SEQ ID NO: 6646 - DNA, 17 bp, Artificial Sequence
  Synthetic Polynucleotide
tccctcaacaaagccaa

SEQ ID NO: 6647 - DNA, 17 bp, Artificial Sequence
  Synthetic Polynucleotide
tccaacccgtagcaact

SEQ ID NO: 6648 - DNA, 19 bp, Artificial Sequence
  Synthetic Polynucleotide
tatacacacttagattccg

SEQ ID NO: 6649 - DNA, 19 bp, Artificial Sequence
  Synthetic Polynucleotide
cttagaactccagaactct

SEQ ID NO: 6650 - DNA, 20 bp, Artificial Sequence
  Synthetic Polynucleotide
cattagaaccaactgtgaat

SEQ ID NO: 6651 - DNA, 19 bp, Artificial Sequence
  Synthetic Polynucleotide
cacgaatttgagtcagata

SEQ ID NO: 6652 - DNA, 20 bp, Artificial Sequence
  Synthetic Polynucleotide
cgtaattcaggtacactcac

SEQ ID NO: 6653 - DNA, 17 bp, Artificial Sequence
  Synthetic Polynucleotide
gaactatcgcaacgaca

SEQ ID NO: 6654 - DNA, 19 bp, Artificial Sequence
  Synthetic Polynucleotide
tcagctcatcaaaatccac

SEQ ID NO: 6655 - DNA, 18 bp, Artificial Sequence
  Synthetic Polynucleotide
aacaacagtggaaactct

SEQ ID NO: 6656 - DNA, 18 bp, Artificial Sequence
  Synthetic Polynucleotide
atggctctatctgcatcc

SEQ ID NO: 6657 - DNA, 20 bp, Artificial Sequence
  Synthetic Polynucleotide
tagttattttgaaatgcgtt

SEQ ID NO: 6658 - DNA, 19 bp, Artificial Sequence
  Synthetic Polynucleotide
gcgctgtatttattcactc

SEQ ID NO: 6659 - DNA, 17 bp, Artificial Sequence
  Synthetic Polynucleotide
cgctgaaaagacgtttt

SEQ ID NO: 6660 - DNA, 19 bp, Artificial Sequence
  Synthetic Polynucleotide
tgactaagtgtttgaacca

SEQ ID NO: 6661 - DNA, 17 bp, Artificial Sequence
  Synthetic Polynucleotide
ggctgaagctgtttcgc

SEQ ID NO: 6662 - DNA, 17 bp, Artificial Sequence
  Synthetic Polynucleotide
gtccctccctcgatggt

SEQ ID NO: 6663 - DNA, 19 bp, Artificial Sequence
  Synthetic Polynucleotide
gttcatgccgttgtattgg

SEQ ID NO: 6664 - DNA, 18 bp, Artificial Sequence
  Synthetic Polynucleotide
tagaattggcagtcacgc

SEQ ID NO: 6665 - DNA, 17 bp, Artificial Sequence
  Synthetic Polynucleotide
agcaagttcccatgtac

SEQ ID NO: 6666 - DNA, 18 bp, Artificial Sequence
  Synthetic Polynucleotide
tttggtctggaactcaga

SEQ ID NO: 6667 - DNA, 20 bp, Artificial Sequence
  Synthetic Polynucleotide
atcattgttctcacgaagac

SEQ ID NO: 6668 - DNA, 20 bp, Artificial Sequence
  Synthetic Polynucleotide
caaggtcattgaacaatctg

SEQ ID NO: 6669 - DNA, 19 bp, Artificial Sequence
  Synthetic Polynucleotide
tatctgatgtcactaggtg

SEQ ID NO: 6670 - DNA, 18 bp, Artificial Sequence
  Synthetic Polynucleotide
accaatcgttgctgtatc

SEQ ID NO: 6671 - DNA, 18 bp, Artificial Sequence
  Synthetic Polynucleotide
gttggactcttcttggcc

SEQ ID NO: 6672 - DNA, 19 bp, Artificial Sequence
  Synthetic Polynucleotide
tttataccaagttcgctta

SEQ ID NO: 6673 - DNA, 19 bp, Artificial Sequence
  Synthetic Polynucleotide
agtttaaggccccgtcaac

SEQ ID NO: 6674 - DNA, 18 bp, Artificial Sequence
  Synthetic Polynucleotide
cgctcattggctttatct

SEQ ID NO: 6675 - DNA, 18 bp, Artificial Sequence
  Synthetic Polynucleotide
gtacttatctgcacacgt

SEQ ID NO: 6676 - DNA, 20 bp, Artificial Sequence
  Synthetic Polynucleotide
aaatccctcgatctcttcaa

SEQ ID NO: 6677 - DNA, 18 bp, Artificial Sequence
  Synthetic Polynucleotide
agtcccaaatgtatccga

SEQ ID NO: 6678 - DNA, 20 bp, Artificial Sequence
  Synthetic Polynucleotide
gctacacccgaattgaatat

SEQ ID NO: 6679 - DNA, 18 bp, Artificial Sequence
  Synthetic Polynucleotide
tcaatcctatgatggtcg

SEQ ID NO: 6680 - DNA, 20 bp, Artificial Sequence
  Synthetic Polynucleotide
ggtattcccgcttaaagtat

SEQ ID NO: 6681 - DNA, 19 bp, Artificial Sequence
  Synthetic Polynucleotide
agctaacatgacaagtttg

SEQ ID NO: 6682 - DNA, 17 bp, Artificial Sequence
  Synthetic Polynucleotide
agccccaaatatacccg

SEQ ID NO: 6683 - DNA, 17 bp, Artificial Sequence
  Synthetic Polynucleotide
cctgctggactatgtag

SEQ ID NO: 6684 - DNA, 17 bp, Artificial Sequence
  Synthetic Polynucleotide
ccttgcgtccggtcttc

SEQ ID NO: 6685 - DNA, 18 bp, Artificial Sequence
  Synthetic Polynucleotide
aagtaaaggcaacatcca

SEQ ID NO: 6686 - DNA, 17 bp, Artificial Sequence
  Synthetic Polynucleotide
gctgaaattgctgctgg

SEQ ID NO: 6687 - DNA, 18 bp, Artificial Sequence
  Synthetic Polynucleotide
gcaggtgttacagtcccg

SEQ ID NO: 6688 - DNA, 17 bp, Artificial Sequence
  Synthetic Polynucleotide
ctgccacaggattttca

SEQ ID NO: 6689 - DNA, 17 bp, Artificial Sequence
  Synthetic Polynucleotide
tgcttcctcttgcaaaa

SEQ ID NO: 6690 - DNA, 20 bp, Artificial Sequence
  Synthetic Polynucleotide
cacttagtgatgagtaccct

SEQ ID NO: 6691 - DNA, 18 bp, Artificial Sequence
  Synthetic Polynucleotide
ccgctttccttgtcatga

SEQ ID NO: 6692 - DNA, 20 bp, Artificial Sequence
  Synthetic Polynucleotide
tcttggggaaacaataccaa

SEQ ID NO: 6693 - DNA, 20 bp, Artificial Sequence
  Synthetic Polynucleotide
tactagacactccaacaacc

SEQ ID NO: 6694 - DNA, 18 bp, Artificial Sequence
  Synthetic Polynucleotide
agccctgattgtgtacca

SEQ ID NO: 6695 - DNA, 20 bp, Artificial Sequence
  Synthetic Polynucleotide
gctgaagtattcgaccttgc

SEQ ID NO: 6696 - DNA, 20 bp, Artificial Sequence
  Synthetic Polynucleotide
gttcacaaatcttgcgaatg

SEQ ID NO: 6697 - DNA, 19 bp, Artificial Sequence
  Synthetic Polynucleotide
ggtgatgaagagaaaatga

SEQ ID NO: 6698 - DNA, 17 bp, Artificial Sequence
  Synthetic Polynucleotide
agcaccatcatttggtc

SEQ ID NO: 6699 - DNA, 18 bp, Artificial Sequence
  Synthetic Polynucleotide
gcctcacatatcatttga

SEQ ID NO: 6700 - DNA, 20 bp, Artificial Sequence
  Synthetic Polynucleotide
gtagctgttattaaactccc

SEQ ID NO: 6701 - DNA, 18 bp, Artificial Sequence
  Synthetic Polynucleotide
tgagcttcctacaagcca

SEQ ID NO: 6702 - DNA, 20 bp, Artificial Sequence
  Synthetic Polynucleotide
cctatcatcccacagaaact

SEQ ID NO: 6703 - DNA, 17 bp, Artificial Sequence
  Synthetic Polynucleotide
ttctactagagtcccga

SEQ ID NO: 6704 - DNA, 20 bp, Artificial Sequence
  Synthetic Polynucleotide
taaccagttctacctctcct

SEQ ID NO: 6705 - DNA, 20 bp, Artificial Sequence
  Synthetic Polynucleotide
gtctactccagttttaactc

SEQ ID NO: 6706 - DNA, 20 bp, Artificial Sequence
  Synthetic Polynucleotide
tcaaagccaacaaagtccta

SEQ ID NO: 6707 - DNA, 18 bp, Artificial Sequence
  Synthetic Polynucleotide
tacaacaatatgcttcca

SEQ ID NO: 6708 - DNA, 18 bp, Artificial Sequence
  Synthetic Polynucleotide
gtctgtcaaagtccactt

SEQ ID NO: 6709 - DNA, 17 bp, Artificial Sequence
  Synthetic Polynucleotide
acgtttccatccaagcc

SEQ ID NO: 6710 - DNA, 20 bp, Artificial Sequence
  Synthetic Polynucleotide
ggaatgtgggtgatgatgga

SEQ ID NO: 6711 - DNA, 17 bp, Artificial Sequence
  Synthetic Polynucleotide
aaaccatatcgtggcat

SEQ ID NO: 6712 - DNA, 17 bp, Artificial Sequence
  Synthetic Polynucleotide
atggtttggtgcattga

SEQ ID NO: 6713 - DNA, 17 bp, Artificial Sequence
  Synthetic Polynucleotide
ttccactgtgtgtctct

SEQ ID NO: 6714 - DNA, 17 bp, Artificial Sequence
  Synthetic Polynucleotide
tggtatgagggagtgag

SEQ ID NO: 6715 - DNA, 17 bp, Artificial Sequence
  Synthetic Polynucleotide
gctgtctcagctatgta

SEQ ID NO: 6716 - DNA, 17 bp, Artificial Sequence
  Synthetic Polynucleotide
ggagctaaagtttgcgt

SEQ ID NO: 6717 - DNA, 17 bp, Artificial Sequence
  Synthetic Polynucleotide
catccgttgctgtgtgc

SEQ ID NO: 6718 - DNA, 18 bp, Artificial Sequence
  Synthetic Polynucleotide
taaatgctgtgcttagaa

SEQ ID NO: 6719 - DNA, 20 bp, Artificial Sequence
  Synthetic Polynucleotide
agctgtctctgcaatatatg

SEQ ID NO: 6720 - DNA, 17 bp, Artificial Sequence
  Synthetic Polynucleotide
caatgattgaggcatgg

SEQ ID NO: 6721 - DNA, 20 bp, Artificial Sequence
  Synthetic Polynucleotide
ctgcatgtgggcttccttag

SEQ ID NO: 6722 - DNA, 20 bp, Artificial Sequence
  Synthetic Polynucleotide
aacttaggagaacaaatgtt

SEQ ID NO: 6723 - DNA, 20 bp, Artificial Sequence
  Synthetic Polynucleotide
cactgaaactaaagagaaca

SEQ ID NO: 6724 - DNA, 17 bp, Artificial Sequence
  Synthetic Polynucleotide
gcaagttgtttggactt

SEQ ID NO: 6725 - DNA, 17 bp, Artificial Sequence
  Synthetic Polynucleotide
tgagtaaccttcctcca

SEQ ID NO: 6726 - DNA, 18 bp, Artificial Sequence
  Synthetic Polynucleotide
ggaaccgttttacgactc

SEQ ID NO: 6727 - DNA, 20 bp, Artificial Sequence
  Synthetic Polynucleotide
gctgtaaatgatcgagtttt

SEQ ID NO: 6728 - DNA, 17 bp, Artificial Sequence
  Synthetic Polynucleotide
aacataaaggcagttgc

SEQ ID NO: 6729 - DNA, 18 bp, Artificial Sequence
  Synthetic Polynucleotide
ctcaatatacgcttcagc

SEQ ID NO: 6730 - DNA, 18 bp, Artificial Sequence
  Synthetic Polynucleotide
gtgggtgtattgtgacgc

SEQ ID NO: 6731 - DNA, 17 bp, Artificial Sequence
  Synthetic Polynucleotide
gggaatgttgtgaagta

SEQ ID NO: 6732 - DNA, 20 bp, Artificial Sequence
  Synthetic Polynucleotide
aagttaaattatgctgtggc

SEQ ID NO: 6733 - DNA, 20 bp, Artificial Sequence
  Synthetic Polynucleotide
ttaaacatggtgtcaaagac

SEQ ID NO: 6734 - DNA, 20 bp, Artificial Sequence
  Synthetic Polynucleotide
cgtacattgaaaagagaaac

SEQ ID NO: 6735 - DNA, 17 bp, Artificial Sequence
  Synthetic Polynucleotide
tctgtgtcctcttcttg

SEQ ID NO: 6736 - DNA, 17 bp, Artificial Sequence
  Synthetic Polynucleotide
gccattgttggatcatg

SEQ ID NO: 6737 - DNA, 18 bp, Artificial Sequence
  Synthetic Polynucleotide
cttcgttgggctcttaag

SEQ ID NO: 6738 - DNA, 18 bp, Artificial Sequence
  Synthetic Polynucleotide
ttggtgattcgaggtaga

SEQ ID NO: 6739 - DNA, 20 bp, Artificial Sequence
  Synthetic Polynucleotide
atacaccaaaccattaatcc

SEQ ID NO: 6740 - DNA, 20 bp, Artificial Sequence
  Synthetic Polynucleotide
gatgatttcaacaaccaatt

SEQ ID NO: 6741 - DNA, 17 bp, Artificial Sequence
  Synthetic Polynucleotide
gctgctgctttcatctg

SEQ ID NO: 6742 - DNA, 17 bp, Artificial Sequence
  Synthetic Polynucleotide
atgccacgatatggtct

SEQ ID NO: 6743 - DNA, 17 bp, Artificial Sequence
  Synthetic Polynucleotide
ccattctcaatgcacca

SEQ ID NO: 6744 - DNA, 18 bp, Artificial Sequence
  Synthetic Polynucleotide
gacaaggacattcacagc

SEQ ID NO: 6745 - DNA, 19 bp, Artificial Sequence
  Synthetic Polynucleotide
caactccgccagataattt

SEQ ID NO: 6746 - DNA, 18 bp, Artificial Sequence
  Synthetic Polynucleotide
ccacacacttgcacatca

SEQ ID NO: 6747 - DNA, 19 bp, Artificial Sequence
  Synthetic Polynucleotide
aagtaagattccaacaacc

SEQ ID NO: 6748 - DNA, 18 bp, Artificial Sequence
  Synthetic Polynucleotide
gtggtaataacgatgagc

SEQ ID NO: 6749 - DNA, 17 bp, Artificial Sequence
  Synthetic Polynucleotide
accgtccgtagaatcct

SEQ ID NO: 6750 - DNA, 17 bp, Artificial Sequence
  Synthetic Polynucleotide
gttttacctccgttgct

SEQ ID NO: 6751 - DNA, 17 bp, Artificial Sequence
  Synthetic Polynucleotide
attctttcctgctccaa

SEQ ID NO: 6752 - DNA, 19 bp, Artificial Sequence
  Synthetic Polynucleotide
ttttccacctttccctcaa

SEQ ID NO: 6753 - DNA, 20 bp, Artificial Sequence
  Synthetic Polynucleotide
gaaatccaatgtttccagaa

SEQ ID NO: 6754 - DNA, 17 bp, Artificial Sequence
  Synthetic Polynucleotide
atgccaaaggacttccc

SEQ ID NO: 6755 - DNA, 17 bp, Artificial Sequence
  Synthetic Polynucleotide
tctccgtgttttcttcc

SEQ ID NO: 6756 - DNA, 19 bp, Artificial Sequence
  Synthetic Polynucleotide
gcaatgatagaatcatggg

SEQ ID NO: 6757 - DNA, 17 bp, Artificial Sequence
  Synthetic Polynucleotide
gttgcccactgttattg

SEQ ID NO: 6758 - DNA, 17 bp, Artificial Sequence
  Synthetic Polynucleotide
gcaacactgatttgcca

SEQ ID NO: 6759 - DNA, 20 bp, Artificial Sequence
  Synthetic Polynucleotide
acatcaaccaacatagctaa

SEQ ID NO: 6760 - DNA, 17 bp, Artificial Sequence
  Synthetic Polynucleotide
cacctgggttcatgtta

SEQ ID NO: 6761 - DNA, 19 bp, Artificial Sequence
  Synthetic Polynucleotide
atttctccaacctttcttc

SEQ ID NO: 6762 - DNA, 20 bp, Artificial Sequence
  Synthetic Polynucleotide
gagtctgtatccacattttg

SEQ ID NO: 6763 - DNA, 20 bp, Artificial Sequence
  Synthetic Polynucleotide
gtctaattgattgtcgcaca

SEQ ID NO: 6764 - DNA, 19 bp, Artificial Sequence
  Synthetic Polynucleotide
gaaaagctcccaacacaac

SEQ ID NO: 6765 - DNA, 19 bp, Artificial Sequence
  Synthetic Polynucleotide
ttctttcttgctcaagctt

SEQ ID NO: 6766 - DNA, 17 bp, Artificial Sequence
  Synthetic Polynucleotide
aggtcaactgtctcaga

SEQ ID NO: 6767 - DNA, 18 bp, Artificial Sequence
  Synthetic Polynucleotide
ttatgtcgtcaaactcgt

SEQ ID NO: 6768 - DNA, 19 bp, Artificial Sequence
  Synthetic Polynucleotide
cagatttgttttcgtctgc

SEQ ID NO: 6769 - DNA, 17 bp, Artificial Sequence
  Synthetic Polynucleotide
tcccactcttccatgaa

SEQ ID NO: 6770 - DNA, 17 bp, Artificial Sequence
  Synthetic Polynucleotide
atgggagtttggaatgg

SEQ ID NO: 6771 - DNA, 18 bp, Artificial Sequence
  Synthetic Polynucleotide
ttagtgaagtttgctcct

SEQ ID NO: 6772 - DNA, 18 bp, Artificial Sequence
  Synthetic Polynucleotide
aaagaagcagatgttcgc

SEQ ID NO: 6773 - DNA, 17 bp, Artificial Sequence
  Synthetic Polynucleotide
tcgatgcaccacaccat

SEQ ID NO: 6774 - DNA, 20 bp, Artificial Sequence
  Synthetic Polynucleotide
agcaccatacatagcagaaa

SEQ ID NO: 6775 - DNA, 17 bp, Artificial Sequence
  Synthetic Polynucleotide
aggctgtgaaaacacgc

SEQ ID NO: 6776 - DNA, 19 bp, Artificial Sequence
  Synthetic Polynucleotide
gaagccattttctacacca

SEQ ID NO: 6777 - DNA, 18 bp, Artificial Sequence
  Synthetic Polynucleotide
gtgacaccattttcgatt

SEQ ID NO: 6778 - DNA, 17 bp, Artificial Sequence
  Synthetic Polynucleotide
agctagacaagcggcaa

SEQ ID NO: 6779 - DNA, 20 bp, Artificial Sequence
  Synthetic Polynucleotide
tcacatttcctgtgtacaaa

SEQ ID NO: 6780 - DNA, 17 bp, Artificial Sequence
  Synthetic Polynucleotide
caaccccacttagcatc

SEQ ID NO: 6781 - DNA, 19 bp, Artificial Sequence
  Synthetic Polynucleotide
agctccatttcttgatgtg

SEQ ID NO: 6782 - DNA, 17 bp, Artificial Sequence
  Synthetic Polynucleotide
taccatgcaaagcgatt

SEQ ID NO: 6783 - DNA, 19 bp, Artificial Sequence
  Synthetic Polynucleotide
gaacccttagtacgccatt

SEQ ID NO: 6784 - DNA, 18 bp, Artificial Sequence
  Synthetic Polynucleotide
gttcatccgatttctgga

SEQ ID NO: 6785 - DNA, 19 bp, Artificial Sequence
  Synthetic Polynucleotide
cacgtaagaaacacctcca

SEQ ID NO: 6786 - DNA, 20 bp, Artificial Sequence
  Synthetic Polynucleotide
gaatgcggttattagaaggc

SEQ ID NO: 6787 - DNA, 20 bp, Artificial Sequence
  Synthetic Polynucleotide
aaatttgttttatccgtggt

SEQ ID NO: 6788 - DNA, 19 bp, Artificial Sequence
  Synthetic Polynucleotide
gatttgatcattgctgttg

SEQ ID NO: 6789 - DNA, 18 bp, Artificial Sequence
  Synthetic Polynucleotide
gagattggaaccacttct

SEQ ID NO: 6790 - DNA, 20 bp, Artificial Sequence
  Synthetic Polynucleotide
gccctggtagcgattatatg

SEQ ID NO: 6791 - DNA, 17 bp, Artificial Sequence
  Synthetic Polynucleotide
gattggccctttagaca

SEQ ID NO: 6792 - DNA, 17 bp, Artificial Sequence
  Synthetic Polynucleotide
tttgctgaaagaacacg

SEQ ID NO: 6793 - DNA, 18 bp, Artificial Sequence
  Synthetic Polynucleotide
gttgtgatgggattatgg

SEQ ID NO: 6794 - DNA, 17 bp, Artificial Sequence
  Synthetic Polynucleotide
cgagtttgatgtcccag

SEQ ID NO: 6795 - DNA, 20 bp, Artificial Sequence
  Synthetic Polynucleotide
cattaactgtccacttgcaa

SEQ ID NO: 6796 - DNA, 20 bp, Artificial Sequence
  Synthetic Polynucleotide
gactcttcctagatcgtgcg

SEQ ID NO: 6797 - DNA, 20 bp, Artificial Sequence
  Synthetic Polynucleotide
tcaactgacttttcctgcgt

SEQ ID NO: 6798 - DNA, 19 bp, Artificial Sequence
  Synthetic Polynucleotide
attgattcatttgggtcat

SEQ ID NO: 6799 - DNA, 20 bp, Artificial Sequence
  Synthetic Polynucleotide
ttgcgagatagcacattcca

SEQ ID NO: 6800 - DNA, 18 bp, Artificial Sequence
  Synthetic Polynucleotide
agcgtcaagaattcctcc

SEQ ID NO: 6801 - DNA, 18 bp, Artificial Sequence
  Synthetic Polynucleotide
ctcgtttcacattgcgta

SEQ ID NO: 6802 - DNA, 20 bp, Artificial Sequence
  Synthetic Polynucleotide
aagcaaatagcagactattt

SEQ ID NO: 6803 - DNA, 17 bp, Artificial Sequence
  Synthetic Polynucleotide
gacgttttctatgcagg

SEQ ID NO: 6804 - DNA, 17 bp, Artificial Sequence
  Synthetic Polynucleotide
tctacctctttagcacc

SEQ ID NO: 6805 - DNA, 19 bp, Artificial Sequence
  Synthetic Polynucleotide
gtcttacgaacaccatttg

SEQ ID NO: 6806 - DNA, 19 bp, Artificial Sequence
  Synthetic Polynucleotide
caaggggcatcacatatgg

SEQ ID NO: 6807 - DNA, 19 bp, Artificial Sequence
  Synthetic Polynucleotide
ctctgtaattccgacccgt

SEQ ID NO: 6808 - DNA, 20 bp, Artificial Sequence
  Synthetic Polynucleotide
ggcgatagtgggatagttct

SEQ ID NO: 6809 - DNA, 20 bp, Artificial Sequence
  Synthetic Polynucleotide
ttcagttttcctctcatcac

SEQ ID NO: 6810 - DNA, 19 bp, Artificial Sequence
  Synthetic Polynucleotide
ttggcactttaagcagagt

SEQ ID NO: 6811 - DNA, 20 bp, Artificial Sequence
  Synthetic Polynucleotide
tgtggaacataagcctttat

SEQ ID NO: 6812 - DNA, 18 bp, Artificial Sequence
  Synthetic Polynucleotide
tcttcatgcgagacaact

SEQ ID NO: 6813 - DNA, 20 bp, Artificial Sequence
  Synthetic Polynucleotide
ttccatatcacctcatggtt

SEQ ID NO: 6814 - DNA, 20 bp, Artificial Sequence
  Synthetic Polynucleotide
attactcacagctctacaga

SEQ ID NO: 6815 - DNA, 18 bp, Artificial Sequence
  Synthetic Polynucleotide
ctctcagtttgcttatgg

SEQ ID NO: 6816 - DNA, 20 bp, Artificial Sequence
  Synthetic Polynucleotide
tacacatttccaatgagaca

SEQ ID NO: 6817 - DNA, 19 bp, Artificial Sequence
  Synthetic Polynucleotide
tactcgcacaagaacaacc

SEQ ID NO: 6818 - DNA, 17 bp, Artificial Sequence
  Synthetic Polynucleotide
tgcacgatctcctggat

SEQ ID NO: 6819 - DNA, 20 bp, Artificial Sequence
  Synthetic Polynucleotide
attccactttgtacattcag

SEQ ID NO: 6820 - DNA, 20 bp, Artificial Sequence
  Synthetic Polynucleotide
accataccttgaacttctaa

SEQ ID NO: 6821 - DNA, 19 bp, Artificial Sequence
  Synthetic Polynucleotide
ccgtattggtacactgtat

SEQ ID NO: 6822 - DNA, 20 bp, Artificial Sequence
  Synthetic Polynucleotide
taacagtagttgccactttt

SEQ ID NO: 6823 - DNA, 17 bp, Artificial Sequence
  Synthetic Polynucleotide
gtaatgacggacgaaga

SEQ ID NO: 6824 - DNA, 20 bp, Artificial Sequence
  Synthetic Polynucleotide
tcctgtataacattctccac

SEQ ID NO: 6825 - DNA, 17 bp, Artificial Sequence
  Synthetic Polynucleotide
tattctaagggacacgt

SEQ ID NO: 6826 - DNA, 17 bp, Artificial Sequence
  Synthetic Polynucleotide
tcggaagataaacacgc

SEQ ID NO: 6827 - DNA, 19 bp, Artificial Sequence
  Synthetic Polynucleotide
caaatgcccaagctagtat

SEQ ID NO: 6828 - DNA, 19 bp, Artificial Sequence
  Synthetic Polynucleotide
attgccactctataactcc

SEQ ID NO: 6829 - DNA, 20 bp, Artificial Sequence
  Synthetic Polynucleotide
ctaacgatatcaccattctt

SEQ ID NO: 6830 - DNA, 19 bp, Artificial Sequence
  Synthetic Polynucleotide
aagagcaggataaagagtt

SEQ ID NO: 6831 - DNA, 20 bp, Artificial Sequence
  Synthetic Polynucleotide
aacaacattcaattcatgtg

SEQ ID NO: 6832 - DNA, 18 bp, Artificial Sequence
  Synthetic Polynucleotide
cacaaacacagccttttg

SEQ ID NO: 6833 - DNA, 17 bp, Artificial Sequence
  Synthetic Polynucleotide
tctcactctcgctattc

SEQ ID NO: 6834 - DNA, 18 bp, Artificial Sequence
  Synthetic Polynucleotide
gacacgttcagaatcgcg

SEQ ID NO: 6835 - DNA, 17 bp, Artificial Sequence
  Synthetic Polynucleotide
gtacgatgcgaatgcag

SEQ ID NO: 6836 - DNA, 18 bp, Artificial Sequence
  Synthetic Polynucleotide
cgggctgatccaaaggtt

SEQ ID NO: 6837 - DNA, 17 bp, Artificial Sequence
  Synthetic Polynucleotide
ttatgccgtgccataac

SEQ ID NO: 6838 - DNA, 20 bp, Artificial Sequence
  Synthetic Polynucleotide
ttggtgaagatggacacgat

SEQ ID NO: 6839 - DNA, 17 bp, Artificial Sequence
  Synthetic Polynucleotide
tggctgacgttatcaac

SEQ ID NO: 6840 - DNA, 19 bp, Artificial Sequence
  Synthetic Polynucleotide
tgagtttagtgccttatca

SEQ ID NO: 6841 - DNA, 17 bp, Artificial Sequence
  Synthetic Polynucleotide
tatgattgactgtggct

SEQ ID NO: 6842 - DNA, 20 bp, Artificial Sequence
  Synthetic Polynucleotide
acacattgagtgtaatcact

SEQ ID NO: 6843 - DNA, 19 bp, Artificial Sequence
  Synthetic Polynucleotide
tagtagagtgctaagagaa

SEQ ID NO: 6844 - DNA, 20 bp, Artificial Sequence
  Synthetic Polynucleotide
agaaaatacaacatcagtgg

SEQ ID NO: 6845 - DNA, 20 bp, Artificial Sequence
  Synthetic Polynucleotide
aattgtaagtgtcggaagca

SEQ ID NO: 6846 - DNA, 18 bp, Artificial Sequence
  Synthetic Polynucleotide
aacttcgaattagggagg

SEQ ID NO: 6847 - DNA, 20 bp, Artificial Sequence
  Synthetic Polynucleotide
acagtatagaatacttgcca

SEQ ID NO: 6848 - DNA, 19 bp, Artificial Sequence
  Synthetic Polynucleotide
ataaactaggaccgagaga

SEQ ID NO: 6849 - DNA, 20 bp, Artificial Sequence
  Synthetic Polynucleotide
ggatatgcgttatgtcactt

SEQ ID NO: 6850 - DNA, 20 bp, Artificial Sequence
  Synthetic Polynucleotide
tctccattctgtctacaaat

SEQ ID NO: 6851 - DNA, 20 bp, Artificial Sequence
  Synthetic Polynucleotide
cgctccagtgtaacaatttg

SEQ ID NO: 6852 - DNA, 20 bp, Artificial Sequence
  Synthetic Polynucleotide
ggttatgctgaagagatcag

SEQ ID NO: 6853 - DNA, 20 bp, Artificial Sequence
  Synthetic Polynucleotide
tcctgaatttacgatatctc

SEQ ID NO: 6854 - DNA, 19 bp, Artificial Sequence
  Synthetic Polynucleotide
ctacacccgctttaatccg

SEQ ID NO: 6855 - DNA, 20 bp, Artificial Sequence
  Synthetic Polynucleotide
gaagatgaatctccgctgtc

SEQ ID NO: 6856 - DNA, 18 bp, Artificial Sequence
  Synthetic Polynucleotide
cgaattacatagggtcgg

SEQ ID NO: 6857 - DNA, 20 bp, Artificial Sequence
  Synthetic Polynucleotide
aaagccttaatccttgaatt

SEQ ID NO: 6858 - DNA, 19 bp, Artificial Sequence
  Synthetic Polynucleotide
aacgagatgcaaatatacg

SEQ ID NO: 6859 - DNA, 19 bp, Artificial Sequence
  Synthetic Polynucleotide
ggatagtagatgctctgat

SEQ ID NO: 6860 - DNA, 20 bp, Artificial Sequence
  Synthetic Polynucleotide
cgcgaacaaagactattcaa

SEQ ID NO: 6861 - DNA, 17 bp, Artificial Sequence
  Synthetic Polynucleotide
gttctacctgctgtgcg

SEQ ID NO: 6862 - DNA, 18 bp, Artificial Sequence
  Synthetic Polynucleotide
cgtgcctggaaatgtata

SEQ ID NO: 6863 - DNA, 19 bp, Artificial Sequence
  Synthetic Polynucleotide
caccgcttagaagagatga

SEQ ID NO: 6864 - DNA, 17 bp, Artificial Sequence
  Synthetic Polynucleotide
ctgccagaaatgccttc

SEQ ID NO: 6865 - DNA, 19 bp, Artificial Sequence
  Synthetic Polynucleotide
gcatcagcatctccacctc

SEQ ID NO: 6866 - DNA, 19 bp, Artificial Sequence
  Synthetic Polynucleotide
tccgaggagttaaaacaga

SEQ ID NO: 6867 - DNA, 20 bp, Artificial Sequence
  Synthetic Polynucleotide
aagtttaaagttcagatgga

SEQ ID NO: 6868 - DNA, 17 bp, Artificial Sequence
  Synthetic Polynucleotide
cgactgccatcgagatg

SEQ ID NO: 6869 - DNA, 17 bp, Artificial Sequence
  Synthetic Polynucleotide
gccctaatccgagttct

SEQ ID NO: 6870 - DNA, 19 bp, Artificial Sequence
  Synthetic Polynucleotide
agtcggttaagaacgcacg

SEQ ID NO: 6871 - DNA, 19 bp, Artificial Sequence
  Synthetic Polynucleotide
cgtcgcccaaccattatat

SEQ ID NO: 6872 - DNA, 18 bp, Artificial Sequence
  Synthetic Polynucleotide
gcagtaagaatggttgca

SEQ ID NO: 6873 - DNA, 18 bp, Artificial Sequence
  Synthetic Polynucleotide
taagtgtgtcgaggatgg

SEQ ID NO: 6874 - DNA, 20 bp, Artificial Sequence
  Synthetic Polynucleotide
catcatgctatccaggttag

SEQ ID NO: 6875 - DNA, 18 bp, Artificial Sequence
  Synthetic Polynucleotide
aggtcgggtaataatgcg

SEQ ID NO: 6876 - DNA, 19 bp, Artificial Sequence
  Synthetic Polynucleotide
cgctacatacgttattgtg

SEQ ID NO: 6877 - DNA, 20 bp, Artificial Sequence
  Synthetic Polynucleotide
gaaagttgcctacttcagta

SEQ ID NO: 6878 - DNA, 17 bp, Artificial Sequence
  Synthetic Polynucleotide
ggacaaggcaaactctc

SEQ ID NO: 6879 - DNA, 19 bp, Artificial Sequence
  Synthetic Polynucleotide
tcttcaccaccccttccaa

SEQ ID NO: 6880 - DNA, 20 bp, Artificial Sequence
  Synthetic Polynucleotide
ccaatgattacgattgtcaa

SEQ ID NO: 6881 - DNA, 20 bp, Artificial Sequence
  Synthetic Polynucleotide
cttccctttataagcaatga

SEQ ID NO: 6882 - DNA, 20 bp, Artificial Sequence
  Synthetic Polynucleotide
ggatttctatttggtacgcg

SEQ ID NO: 6883 - DNA, 19 bp, Artificial Sequence
  Synthetic Polynucleotide
ctcctgccctcatattcac

SEQ ID NO: 6884 - DNA, 20 bp, Artificial Sequence
  Synthetic Polynucleotide
ctctttcagaatcagaatga

SEQ ID NO: 6885 - DNA, 20 bp, Artificial Sequence
  Synthetic Polynucleotide
gcagtaattctagccacgaa

SEQ ID NO: 6886 - DNA, 18 bp, Artificial Sequence
  Synthetic Polynucleotide
cgaaacccaacattacat

SEQ ID NO: 6887 - DNA, 19 bp, Artificial Sequence
  Synthetic Polynucleotide
tttcttcagtttatagccg

SEQ ID NO: 6888 - DNA, 20 bp, Artificial Sequence
  Synthetic Polynucleotide
tcaattccagatcctttaag

SEQ ID NO: 6889 - DNA, 18 bp, Artificial Sequence
  Synthetic Polynucleotide
tagacaaaagaccacata

SEQ ID NO: 6890 - DNA, 19 bp, Artificial Sequence
  Synthetic Polynucleotide
tggatacgttattcatggg

SEQ ID NO: 6891 - DNA, 17 bp, Artificial Sequence
  Synthetic Polynucleotide
caccttcgcctcatcat

SEQ ID NO: 6892 - DNA, 18 bp, Artificial Sequence
  Synthetic Polynucleotide
tgcggaatgattttgatc

SEQ ID NO: 6893 - DNA, 17 bp, Artificial Sequence
  Synthetic Polynucleotide
ttaccactcccaatcac

SEQ ID NO: 6894 - DNA, 17 bp, Artificial Sequence
  Synthetic Polynucleotide
cgtagtctcactcttcc

SEQ ID NO: 6895 - DNA, 19 bp, Artificial Sequence
  Synthetic Polynucleotide
atatgattgacctccgtca

SEQ ID NO: 6896 - DNA, 19 bp, Artificial Sequence
  Synthetic Polynucleotide
gttaaaaccccagcaattc

SEQ ID NO: 6897 - DNA, 19 bp, Artificial Sequence
  Synthetic Polynucleotide
actgcatcacgtatcattt

SEQ ID NO: 6898 - DNA, 20 bp, Artificial Sequence
  Synthetic Polynucleotide
gtacaccttgtctacgcata

SEQ ID NO: 6899 - DNA, 19 bp, Artificial Sequence
  Synthetic Polynucleotide
agttcaggaatcggtacgc

SEQ ID NO: 6900 - DNA, 18 bp, Artificial Sequence
  Synthetic Polynucleotide
atgagtccattccttctc

SEQ ID NO: 6901 - DNA, 20 bp, Artificial Sequence
  Synthetic Polynucleotide
atgtaggagagaatccagag

SEQ ID NO: 6902 - DNA, 19 bp, Artificial Sequence
  Synthetic Polynucleotide
gagaccaaatacccattgc

SEQ ID NO: 6903 - DNA, 19 bp, Artificial Sequence
  Synthetic Polynucleotide
ctccagtatcaaacctagc

SEQ ID NO: 6904 - DNA, 18 bp, Artificial Sequence
  Synthetic Polynucleotide
atcatcacacgcaaatgt

SEQ ID NO: 6905 - DNA, 18 bp, Artificial Sequence
  Synthetic Polynucleotide
gtaatctgacgcacaaac

SEQ ID NO: 6906 - DNA, 19 bp, Artificial Sequence
  Synthetic Polynucleotide
ggatcatgttcacagaaag

SEQ ID NO: 6907 - DNA, 19 bp, Artificial Sequence
  Synthetic Polynucleotide
cagtcggaaagaataaagc

SEQ ID NO: 6908 - DNA, 17 bp, Artificial Sequence
  Synthetic Polynucleotide
aaggcaagagcatcaga

SEQ ID NO: 6909 - DNA, 20 bp, Artificial Sequence
  Synthetic Polynucleotide
caaactaacaaaggagttcg

SEQ ID NO: 6910 - DNA, 20 bp, Artificial Sequence
  Synthetic Polynucleotide
caacgagttcccataggaaa

SEQ ID NO: 6911 - DNA, 20 bp, Artificial Sequence
  Synthetic Polynucleotide
cgcattgtcattggagtaag

SEQ ID NO: 6912 - DNA, 18 bp, Artificial Sequence
  Synthetic Polynucleotide
gacattgagaaccatgtc

SEQ ID NO: 6913 - DNA, 20 bp, Artificial Sequence
  Synthetic Polynucleotide
gaccacatcgccatcatgta

SEQ ID NO: 6914 - DNA, 20 bp, Artificial Sequence
  Synthetic Polynucleotide
gatttagcaagaccatttcc

SEQ ID NO: 6915 - DNA, 18 bp, Artificial Sequence
  Synthetic Polynucleotide
taatcacccagatccaca

SEQ ID NO: 6916 - DNA, 20 bp, Artificial Sequence
  Synthetic Polynucleotide
catgagaatccagctagata

SEQ ID NO: 6917 - DNA, 19 bp, Artificial Sequence
  Synthetic Polynucleotide
accatcatccattgattct

SEQ ID NO: 6918 - DNA, 18 bp, Artificial Sequence
  Synthetic Polynucleotide
ggacttccagtttcatcc

SEQ ID NO: 6919 - DNA, 20 bp, Artificial Sequence
  Synthetic Polynucleotide
ttggcacggcattaccaatc

SEQ ID NO: 6920 - DNA, 18 bp, Artificial Sequence
  Synthetic Polynucleotide
ttttacactgtcgccgtc

SEQ ID NO: 6921 - DNA, 19 bp, Artificial Sequence
  Synthetic Polynucleotide
gacaatataaccgcaggca

SEQ ID NO: 6922 - DNA, 17 bp, Artificial Sequence
  Synthetic Polynucleotide
gtcacttcaagacgcaa

SEQ ID NO: 6923 - DNA, 17 bp, Artificial Sequence
  Synthetic Polynucleotide
tatcttgagcacccact

SEQ ID NO: 6924 - DNA, 18 bp, Artificial Sequence
  Synthetic Polynucleotide
atcgtcccatctcgcaaa

SEQ ID NO: 6925 - DNA, 17 bp, Artificial Sequence
  Synthetic Polynucleotide
taattccatctggctga

SEQ ID NO: 6926 - DNA, 17 bp, Artificial Sequence
  Synthetic Polynucleotide
cctaccgaacatggaaa

SEQ ID NO: 6927 - DNA, 17 bp, Artificial Sequence
  Synthetic Polynucleotide
gggtgtgttgccatacg

SEQ ID NO: 6928 - DNA, 19 bp, Artificial Sequence
  Synthetic Polynucleotide
atgctgaaccttgaaccgg

SEQ ID NO: 6929 - DNA, 20 bp, Artificial Sequence
  Synthetic Polynucleotide
ccttgtagttaatggttgaa

SEQ ID NO: 6930 - DNA, 20 bp, Artificial Sequence
  Synthetic Polynucleotide
gttttagaggaaatgcccga

SEQ ID NO: 6931 - DNA, 17 bp, Artificial Sequence
  Synthetic Polynucleotide
agccctagctaatcgag

SEQ ID NO: 6932 - DNA, 17 bp, Artificial Sequence
  Synthetic Polynucleotide
cctttctgcttagccta

SEQ ID NO: 6933 - DNA, 20 bp, Artificial Sequence
  Synthetic Polynucleotide
ttcacagaaactgctgctcg

SEQ ID NO: 6934 - DNA, 18 bp, Artificial Sequence
  Synthetic Polynucleotide
acatggagaaaagaggca

SEQ ID NO: 6935 - DNA, 18 bp, Artificial Sequence
  Synthetic Polynucleotide
agctgcccgaataaaacc

SEQ ID NO: 6936 - DNA, 18 bp, Artificial Sequence
  Synthetic Polynucleotide
acgacgtaccaaagtata

SEQ ID NO: 6937 - DNA, 17 bp, Artificial Sequence
  Synthetic Polynucleotide
ccagctctctcactacc

SEQ ID NO: 6938 - DNA, 20 bp, Artificial Sequence
  Synthetic Polynucleotide
ctgaaggattacgcaaatat

SEQ ID NO: 6939 - DNA, 17 bp, Artificial Sequence
  Synthetic Polynucleotide
atcaacaaaagcactgc

SEQ ID NO: 6940 - DNA, 17 bp, Artificial Sequence
  Synthetic Polynucleotide
tctgccccgagttttaa

SEQ ID NO: 6941 - DNA, 17 bp, Artificial Sequence
  Synthetic Polynucleotide
ccgcttgatcccactgt

SEQ ID NO: 6942 - DNA, 17 bp, Artificial Sequence
  Synthetic Polynucleotide
cgcactagatcaactga

SEQ ID NO: 6943 - DNA, 18 bp, Artificial Sequence
  Synthetic Polynucleotide
attcccaactttccaaac

SEQ ID NO: 6944 - DNA, 18 bp, Artificial Sequence
  Synthetic Polynucleotide
tcatcttcgtcaggaata

SEQ ID NO: 6945 - DNA, 19 bp, Artificial Sequence
  Synthetic Polynucleotide
tggatgagtccaaaactgg

SEQ ID NO: 6946 - DNA, 19 bp, Artificial Sequence
  Synthetic Polynucleotide
tcatcgtgttagaatgctt

SEQ ID NO: 6947 - DNA, 17 bp, Artificial Sequence
  Synthetic Polynucleotide
gacgctccgacactttg

SEQ ID NO: 6948 - DNA, 19 bp, Artificial Sequence
  Synthetic Polynucleotide
aacgataacttcgctcaag

SEQ ID NO: 6949 - DNA, 19 bp, Artificial Sequence
  Synthetic Polynucleotide
ccacttgacatgacattaa

SEQ ID NO: 6950 - DNA, 17 bp, Artificial Sequence
  Synthetic Polynucleotide
agcaaactatccgagta

SEQ ID NO: 6951 - DNA, 20 bp, Artificial Sequence
  Synthetic Polynucleotide
atgcaagtccgtataatagt

SEQ ID NO: 6952 - DNA, 20 bp, Artificial Sequence
  Synthetic Polynucleotide
tcactcactaccgcaaagat

SEQ ID NO: 6953 - DNA, 17 bp, Artificial Sequence
  Synthetic Polynucleotide
gcgagaagacataggtt

SEQ ID NO: 6954 - DNA, 18 bp, Artificial Sequence
  Synthetic Polynucleotide
taacctgtatccgtttcc

SEQ ID NO: 6955 - DNA, 20 bp, Artificial Sequence
  Synthetic Polynucleotide
agctagatcgtgatttattg

SEQ ID NO: 6956 - DNA, 20 bp, Artificial Sequence
  Synthetic Polynucleotide
tcataattgacgcccctaga

SEQ ID NO: 6957 - DNA, 17 bp, Artificial Sequence
  Synthetic Polynucleotide
cgaaaccccgccataaa

SEQ ID NO: 6958 - DNA, 19 bp, Artificial Sequence
  Synthetic Polynucleotide
atacagcaacgtattgaca

SEQ ID NO: 6959 - DNA, 18 bp, Artificial Sequence
  Synthetic Polynucleotide
tattcgctcgactagtag

SEQ ID NO: 6960 - DNA, 20 bp, Artificial Sequence
  Synthetic Polynucleotide
aaacgcatatagttgagtgg

SEQ ID NO: 6961 - DNA, 17 bp, Artificial Sequence
  Synthetic Polynucleotide
ccacttgtttgacggag

SEQ ID NO: 6962 - DNA, 19 bp, Artificial Sequence
  Synthetic Polynucleotide
agagcctctgtataagaac

SEQ ID NO: 6963 - DNA, 19 bp, Artificial Sequence
  Synthetic Polynucleotide
acaacgtaagagagcaaac

SEQ ID NO: 6964 - DNA, 17 bp, Artificial Sequence
  Synthetic Polynucleotide
ttttcctgttgagacgt

SEQ ID NO: 6965 - DNA, 20 bp, Artificial Sequence
  Synthetic Polynucleotide
ttccacttcctttatttcca

SEQ ID NO: 6966 - DNA, 18 bp, Artificial Sequence
  Synthetic Polynucleotide
ggtatggagatgtacaga

SEQ ID NO: 6967 - DNA, 19 bp, Artificial Sequence
  Synthetic Polynucleotide
cttgaacttcccaaatctc

SEQ ID NO: 6968 - DNA, 17 bp, Artificial Sequence
  Synthetic Polynucleotide
tgagatttgcagttcca

SEQ ID NO: 6969 - DNA, 19 bp, Artificial Sequence
  Synthetic Polynucleotide
cgtaccattcgtagaagaa

SEQ ID NO: 6970 - DNA, 19 bp, Artificial Sequence
  Synthetic Polynucleotide
ttcaagtatttctgacgca

SEQ ID NO: 6971 - DNA, 17 bp, Artificial Sequence
  Synthetic Polynucleotide
agtccagtccatcgtgg

SEQ ID NO: 6972 - DNA, 19 bp, Artificial Sequence
  Synthetic Polynucleotide
cttctggacccaattgttc

SEQ ID NO: 6973 - DNA, 20 bp, Artificial Sequence
  Synthetic Polynucleotide
atccttggtatagacgtatg

SEQ ID NO: 6974 - DNA, 18 bp, Artificial Sequence
  Synthetic Polynucleotide
cggcctatatctggaatg

SEQ ID NO: 6975 - DNA, 20 bp, Artificial Sequence
  Synthetic Polynucleotide
cagcagttagcatactactc

SEQ ID NO: 6976 - DNA, 18 bp, Artificial Sequence
  Synthetic Polynucleotide
cttcccgcagcatttcta

SEQ ID NO: 6977 - DNA, 17 bp, Artificial Sequence
  Synthetic Polynucleotide
agccatcaaaacctggc

SEQ ID NO: 6978 - DNA, 18 bp, Artificial Sequence
  Synthetic Polynucleotide
gcttgagaaaacatcgaa

SEQ ID NO: 6979 - DNA, 20 bp, Artificial Sequence
  Synthetic Polynucleotide
agcctaaaatcgctcctttt

SEQ ID NO: 6980 - DNA, 18 bp, Artificial Sequence
  Synthetic Polynucleotide
ccaagccttccaacgctt

SEQ ID NO: 6981 - DNA, 20 bp, Artificial Sequence
  Synthetic Polynucleotide
cccttccttcttagttcgat

SEQ ID NO: 6982 - DNA, 18 bp, Artificial Sequence
  Synthetic Polynucleotide
agatcgtccttcctgtcc

SEQ ID NO: 6983 - DNA, 17 bp, Artificial Sequence
  Synthetic Polynucleotide
tacatcgtagaaacgcc

SEQ ID NO: 6984 - DNA, 18 bp, Artificial Sequence
  Synthetic Polynucleotide
acgacgcaagagatgagc

SEQ ID NO: 6985 - DNA, 20 bp, Artificial Sequence
  Synthetic Polynucleotide
attcgggcatttgaaatacc

SEQ ID NO: 6986 - DNA, 18 bp, Artificial Sequence
  Synthetic Polynucleotide
taaagcagaaaagatccg

SEQ ID NO: 6987 - DNA, 19 bp, Artificial Sequence
  Synthetic Polynucleotide
cttctgtaccgtgatacta

SEQ ID NO: 6988 - DNA, 18 bp, Artificial Sequence
  Synthetic Polynucleotide
caccacatgtttctatgc

SEQ ID NO: 6989 - DNA, 18 bp, Artificial Sequence
  Synthetic Polynucleotide
ggtgcaataactggaggt

SEQ ID NO: 6990 - DNA, 19 bp, Artificial Sequence
  Synthetic Polynucleotide
aagaagctaatggaactta

SEQ ID NO: 6991 - DNA, 18 bp, Artificial Sequence
  Synthetic Polynucleotide
tacttggcactagcgata

SEQ ID NO: 6992 - DNA, 19 bp, Artificial Sequence
  Synthetic Polynucleotide
gtgcagaaaagaaagagaa

SEQ ID NO: 6993 - DNA, 20 bp, Artificial Sequence
  Synthetic Polynucleotide
ctgcgatccgtttatgatga

SEQ ID NO: 6994 - DNA, 19 bp, Artificial Sequence
  Synthetic Polynucleotide
gaggtgtacatttcgttgc

SEQ ID NO: 6995 - DNA, 20 bp, Artificial Sequence
  Synthetic Polynucleotide
gagaatgttgggaatgaaat

SEQ ID NO: 6996 - DNA, 19 bp, Artificial Sequence
  Synthetic Polynucleotide
gcttgaacaggcagttgat

SEQ ID NO: 6997 - DNA, 20 bp, Artificial Sequence
  Synthetic Polynucleotide
atgctgtgtctatcgtttcc

SEQ ID NO: 6998 - DNA, 17 bp, Artificial Sequence
  Synthetic Polynucleotide
aggctgaccaatacaga

SEQ ID NO: 6999 - DNA, 19 bp, Artificial Sequence
  Synthetic Polynucleotide
ggcaagaaggattctacta

SEQ ID NO: 7000 - DNA, 17 bp, Artificial Sequence
  Synthetic Polynucleotide
tggaggatttcttcggg

SEQ ID NO: 7001 - DNA, 19 bp, Artificial Sequence
  Synthetic Polynucleotide
cgactaggaagagcgaata

SEQ ID NO: 7002 - DNA, 18 bp, Artificial Sequence
  Synthetic Polynucleotide
ttggcatttcagtgattc

SEQ ID NO: 7003 - DNA, 20 bp, Artificial Sequence
  Synthetic Polynucleotide
gatgcgaggtaagggttgag

SEQ ID NO: 7004 - DNA, 19 bp, Artificial Sequence
  Synthetic Polynucleotide
cagtcatccgtaaccctgt

SEQ ID NO: 7005 - DNA, 19 bp, Artificial Sequence
  Synthetic Polynucleotide
acgagtaggcaaattaggt

SEQ ID NO: 7006 - DNA, 18 bp, Artificial Sequence
  Synthetic Polynucleotide
gatattctgactcaccga

SEQ ID NO: 7007 - DNA, 19 bp, Artificial Sequence
  Synthetic Polynucleotide
cgggctaggacatttctca

SEQ ID NO: 7008 - DNA, 20 bp, Artificial Sequence
  Synthetic Polynucleotide
tcgtctaaacaagaaggata

SEQ ID NO: 7009 - DNA, 17 bp, Artificial Sequence
  Synthetic Polynucleotide
gtgaatgaagttgtcga

SEQ ID NO: 7010 - DNA, 19 bp, Artificial Sequence
  Synthetic Polynucleotide
gtcccatgatgtttccgtt

SEQ ID NO: 7011 - DNA, 19 bp, Artificial Sequence
  Synthetic Polynucleotide
ttgcgtcattgaacactcc

SEQ ID NO: 7012 - DNA, 17 bp, Artificial Sequence
  Synthetic Polynucleotide
ttctatccgacgtgatc

SEQ ID NO: 7013 - DNA, 17 bp, Artificial Sequence
  Synthetic Polynucleotide
ggctatccaatggttgc

SEQ ID NO: 7014 - DNA, 17 bp, Artificial Sequence
  Synthetic Polynucleotide
agaggttcgaggagaaa

SEQ ID NO: 7015 - DNA, 17 bp, Artificial Sequence
  Synthetic Polynucleotide
tctatatgcgtaccctc

SEQ ID NO: 7016 - DNA, 19 bp, Artificial Sequence
  Synthetic Polynucleotide
aacatcagttggtgaatcg

SEQ ID NO: 7017 - DNA, 20 bp, Artificial Sequence
  Synthetic Polynucleotide
aacgactttcattgctctga

SEQ ID NO: 7018 - DNA, 17 bp, Artificial Sequence
  Synthetic Polynucleotide
ggtgaatgtagggagag

SEQ ID NO: 7019 - DNA, 20 bp, Artificial Sequence
  Synthetic Polynucleotide
actgacattgccccagaact

SEQ ID NO: 7020 - DNA, 19 bp, Artificial Sequence
  Synthetic Polynucleotide
gatgttgaatgtgacacta

SEQ ID NO: 7021 - DNA, 18 bp, Artificial Sequence
  Synthetic Polynucleotide
cgtccaggctctctttag

SEQ ID NO: 7022 - DNA, 20 bp, Artificial Sequence
  Synthetic Polynucleotide
gggagttttgtttgtagaag

SEQ ID NO: 7023 - DNA, 17 bp, Artificial Sequence
  Synthetic Polynucleotide
cgtctagtaccttgctt

SEQ ID NO: 7024 - DNA, 17 bp, Artificial Sequence
  Synthetic Polynucleotide
cgaaaaccgtaaaccca

SEQ ID NO: 7025 - DNA, 18 bp, Artificial Sequence
  Synthetic Polynucleotide
gactcggaacaaatgcgt

SEQ ID NO: 7026 - DNA, 20 bp, Artificial Sequence
  Synthetic Polynucleotide
tttccgaattttaaacagga

SEQ ID NO: 7027 - DNA, 18 bp, Artificial Sequence
  Synthetic Polynucleotide
tccagtattgacctcaag

SEQ ID NO: 7028 - DNA, 17 bp, Artificial Sequence
  Synthetic Polynucleotide
attcatcgttggcattc

SEQ ID NO: 7029 - DNA, 17 bp, Artificial Sequence
  Synthetic Polynucleotide
gatatgtgcctctggta

SEQ ID NO: 7030 - DNA, 17 bp, Artificial Sequence
  Synthetic Polynucleotide
attggctgcatctgaag

SEQ ID NO: 7031 - DNA, 18 bp, Artificial Sequence
  Synthetic Polynucleotide
gccacagaatcatctgat

SEQ ID NO: 7032 - DNA, 18 bp, Artificial Sequence
  Synthetic Polynucleotide
aatcatcaagcatccacc

SEQ ID NO: 7033 - DNA, 20 bp, Artificial Sequence
  Synthetic Polynucleotide
atctgctgttaaccccatcg

SEQ ID NO: 7034 - DNA, 20 bp, Artificial Sequence
  Synthetic Polynucleotide
gctaatttagttacacacga

SEQ ID NO: 7035 - DNA, 18 bp, Artificial Sequence
  Synthetic Polynucleotide
gccgtattgaactgcccc

SEQ ID NO: 7036 - DNA, 18 bp, Artificial Sequence
  Synthetic Polynucleotide
gcgtagaacaatttgcgg

SEQ ID NO: 7037 - DNA, 20 bp, Artificial Sequence
  Synthetic Polynucleotide
gctcagatcgtactctataa

SEQ ID NO: 7038 - DNA, 18 bp, Artificial Sequence
  Synthetic Polynucleotide
tcgccgaaaagatcagag

SEQ ID NO: 7039 - DNA, 20 bp, Artificial Sequence
  Synthetic Polynucleotide
gtattttcatccatgaccgt

SEQ ID NO: 7040 - DNA, 19 bp, Artificial Sequence
  Synthetic Polynucleotide
gattacccattaggtgaac

SEQ ID NO: 7041 - DNA, 19 bp, Artificial Sequence
  Synthetic Polynucleotide
aggaacccatgtaatcaat

SEQ ID NO: 7042 - DNA, 20 bp, Artificial Sequence
  Synthetic Polynucleotide
atgtcccatttatatatgcc

SEQ ID NO: 7043 - DNA, 18 bp, Artificial Sequence
  Synthetic Polynucleotide
cgaagaaacatcacgaac

SEQ ID NO: 7044 - DNA, 18 bp, Artificial Sequence
  Synthetic Polynucleotide
aacgaaatacacatccct

SEQ ID NO: 7045 - DNA, 19 bp, Artificial Sequence
  Synthetic Polynucleotide
tgggcgagtcattatctcc

SEQ ID NO: 7046 - DNA, 19 bp, Artificial Sequence
  Synthetic Polynucleotide
tctttagaagaaagtggta

SEQ ID NO: 7047 - DNA, 18 bp, Artificial Sequence
  Synthetic Polynucleotide
gtgcttcaagacagccgt

SEQ ID NO: 7048 - DNA, 17 bp, Artificial Sequence
  Synthetic Polynucleotide
ctcagacctagatgcta

SEQ ID NO: 7049 - DNA, 17 bp, Artificial Sequence
  Synthetic Polynucleotide
cccaacgctacaaatct

SEQ ID NO: 7050 - DNA, 19 bp, Artificial Sequence
  Synthetic Polynucleotide
tatgcctttccctttcgtg

SEQ ID NO: 7051 - DNA, 18 bp, Artificial Sequence
  Synthetic Polynucleotide
cagagcttcgtattcaga

SEQ ID NO: 7052 - DNA, 19 bp, Artificial Sequence
  Synthetic Polynucleotide
cagcttgtgaccatgatct

SEQ ID NO: 7053 - DNA, 17 bp, Artificial Sequence
  Synthetic Polynucleotide
ccgctttacgtcctgcc

SEQ ID NO: 7054 - DNA, 18 bp, Artificial Sequence
  Synthetic Polynucleotide
gaccaaacttcccagttg

SEQ ID NO: 7055 - DNA, 19 bp, Artificial Sequence
  Synthetic Polynucleotide
ccctctccagaactaaatt

SEQ ID NO: 7056 - DNA, 20 bp, Artificial Sequence
  Synthetic Polynucleotide
ttccaggttatgaagtagag

SEQ ID NO: 7057 - DNA, 18 bp, Artificial Sequence
  Synthetic Polynucleotide
catcaatcgagttcagca

SEQ ID NO: 7058 - DNA, 17 bp, Artificial Sequence
  Synthetic Polynucleotide
aacaagtaccgttcgat

SEQ ID NO: 7059 - DNA, 17 bp, Artificial Sequence
  Synthetic Polynucleotide
tcaccaaacagagagtt

SEQ ID NO: 7060 - DNA, 20 bp, Artificial Sequence
  Synthetic Polynucleotide
ccaaaagtgagtattcctga

SEQ ID NO: 7061 - DNA, 19 bp, Artificial Sequence
  Synthetic Polynucleotide
tgcagttcaagaaacgatc

SEQ ID NO: 7062 - DNA, 18 bp, Artificial Sequence
  Synthetic Polynucleotide
aatcccatattgcaccga

SEQ ID NO: 7063 - DNA, 19 bp, Artificial Sequence
  Synthetic Polynucleotide
gttagtgaaatcccaatcc

SEQ ID NO: 7064 - DNA, 19 bp, Artificial Sequence
  Synthetic Polynucleotide
gcaataccatcctgtgttt

SEQ ID NO: 7065 - DNA, 17 bp, Artificial Sequence
  Synthetic Polynucleotide
tggccgataggagactg

SEQ ID NO: 7066 - DNA, 20 bp, Artificial Sequence
  Synthetic Polynucleotide
ttaccagcaagagcttcagg

SEQ ID NO: 7067 - DNA, 17 bp, Artificial Sequence
  Synthetic Polynucleotide
caccaatcctcgacaat

SEQ ID NO: 7068 - DNA, 18 bp, Artificial Sequence
  Synthetic Polynucleotide
gcccatattcatcaggct

SEQ ID NO: 7069 - DNA, 19 bp, Artificial Sequence
  Synthetic Polynucleotide
cattcgttcaatccaaaga

SEQ ID NO: 7070 - DNA, 19 bp, Artificial Sequence
  Synthetic Polynucleotide
cgcttatgcaacaatcagg

SEQ ID NO: 7071 - DNA, 17 bp, Artificial Sequence
  Synthetic Polynucleotide
agtcctaaacctccaca

SEQ ID NO: 7072 - DNA, 19 bp, Artificial Sequence
  Synthetic Polynucleotide
catctatcagatccttccg

SEQ ID NO: 7073 - DNA, 17 bp, Artificial Sequence
  Synthetic Polynucleotide
aaaccaacaccagaacc

SEQ ID NO: 7074 - DNA, 18 bp, Artificial Sequence
  Synthetic Polynucleotide
aattacgcaacaatcctc

SEQ ID NO: 7075 - DNA, 18 bp, Artificial Sequence
  Synthetic Polynucleotide
cactgccatcacgggttt

SEQ ID NO: 7076 - DNA, 17 bp, Artificial Sequence
  Synthetic Polynucleotide
cgattgctcgtcgtggg

SEQ ID NO: 7077 - DNA, 17 bp, Artificial Sequence
  Synthetic Polynucleotide
tccattctccgcctcgt

SEQ ID NO: 7078 - DNA, 19 bp, Artificial Sequence
  Synthetic Polynucleotide
tggaagtctaggtcaaaac

SEQ ID NO: 7079 - DNA, 17 bp, Artificial Sequence
  Synthetic Polynucleotide
acctctcgaatagccta

SEQ ID NO: 7080 - DNA, 19 bp, Artificial Sequence
  Synthetic Polynucleotide
tgtaccacagttcttaaca

SEQ ID NO: 7081 - DNA, 18 bp, Artificial Sequence
  Synthetic Polynucleotide
gcaatattttcctgccac

SEQ ID NO: 7082 - DNA, 19 bp, Artificial Sequence
  Synthetic Polynucleotide
tgttgctgttgttcaagtt

SEQ ID NO: 7083 - DNA, 19 bp, Artificial Sequence
  Synthetic Polynucleotide
tgattaagtatcccaagcg

SEQ ID NO: 7084 - DNA, 17 bp, Artificial Sequence
  Synthetic Polynucleotide
catgagtctagctacga

SEQ ID NO: 7085 - DNA, 20 bp, Artificial Sequence
  Synthetic Polynucleotide
cattacagaaccaaagtagg

SEQ ID NO: 7086 - DNA, 17 bp, Artificial Sequence
  Synthetic Polynucleotide
aggagttagtgccgctt

SEQ ID NO: 7087 - DNA, 20 bp, Artificial Sequence
  Synthetic Polynucleotide
gaaatccagttggtctaact

SEQ ID NO: 7088 - DNA, 18 bp, Artificial Sequence
  Synthetic Polynucleotide
gtgaagtgaatcatgtgc

SEQ ID NO: 7089 - DNA, 20 bp, Artificial Sequence
  Synthetic Polynucleotide
atgcctttaattacgccacc

SEQ ID NO: 7090 - DNA, 17 bp, Artificial Sequence
  Synthetic Polynucleotide
gtcattgcatggttgac

SEQ ID NO: 7091 - DNA, 20 bp, Artificial Sequence
  Synthetic Polynucleotide
ctactgtcacacaaagccaa

SEQ ID NO: 7092 - DNA, 19 bp, Artificial Sequence
  Synthetic Polynucleotide
atgataggattgtgcgata

SEQ ID NO: 7093 - DNA, 18 bp, Artificial Sequence
  Synthetic Polynucleotide
cgatatcatagtgcatcg

SEQ ID NO: 7094 - DNA, 18 bp, Artificial Sequence
  Synthetic Polynucleotide
gaagcaccgactaaagaa

SEQ ID NO: 7095 - DNA, 19 bp, Artificial Sequence
  Synthetic Polynucleotide
cagcatctgtctcaaataa

SEQ ID NO: 7096 - DNA, 20 bp, Artificial Sequence
  Synthetic Polynucleotide
agatccagagataatcgggg

SEQ ID NO: 7097 - DNA, 19 bp, Artificial Sequence
  Synthetic Polynucleotide
tcatttccctgctcaccaa

SEQ ID NO: 7098 - DNA, 17 bp, Artificial Sequence
  Synthetic Polynucleotide
ttcttgccgtttaccaa

SEQ ID NO: 7099 - DNA, 18 bp, Artificial Sequence
  Synthetic Polynucleotide
ctggtcaaagctgcccta

SEQ ID NO: 7100 - DNA, 17 bp, Artificial Sequence
  Synthetic Polynucleotide
ggacatcgatcaaacgt

SEQ ID NO: 7101 - DNA, 17 bp, Artificial Sequence
  Synthetic Polynucleotide
cattccgttgttcttgc

SEQ ID NO: 7102 - DNA, 20 bp, Artificial Sequence
  Synthetic Polynucleotide
cgagtcaaacgtattagaaa

SEQ ID NO: 7103 - DNA, 19 bp, Artificial Sequence
  Synthetic Polynucleotide
tgagtccgtctgtcaatta

SEQ ID NO: 7104 - DNA, 18 bp, Artificial Sequence
  Synthetic Polynucleotide
ggagatgtaatagacgct

SEQ ID NO: 7105 - DNA, 19 bp, Artificial Sequence
  Synthetic Polynucleotide
cattcaacttgaccctcac

SEQ ID NO: 7106 - DNA, 19 bp, Artificial Sequence
  Synthetic Polynucleotide
tcgatcatcaaacagagat

SEQ ID NO: 7107 - DNA, 20 bp, Artificial Sequence
  Synthetic Polynucleotide
gcttttatggtagcaaaatc

SEQ ID NO: 7108 - DNA, 20 bp, Artificial Sequence
  Synthetic Polynucleotide
tgatggtttcaactactaac

SEQ ID NO: 7109 - DNA, 20 bp, Artificial Sequence
  Synthetic Polynucleotide
gcgcatcgcttctcgtatac

SEQ ID NO: 7110 - DNA, 17 bp, Artificial Sequence
  Synthetic Polynucleotide
agtcgctgaaattcgga

SEQ ID NO: 7111 - DNA, 20 bp, Artificial Sequence
  Synthetic Polynucleotide
caatctccgcaacacatcca

SEQ ID NO: 7112 - DNA, 17 bp, Artificial Sequence
  Synthetic Polynucleotide
cgttcttccagctcagt

SEQ ID NO: 7113 - DNA, 20 bp, Artificial Sequence
  Synthetic Polynucleotide
cctgcaatcaatgccgctaa

SEQ ID NO: 7114 - DNA, 17 bp, Artificial Sequence
  Synthetic Polynucleotide
aaaacctccagatgtcg

SEQ ID NO: 7115 - DNA, 18 bp, Artificial Sequence
  Synthetic Polynucleotide
ccatcatggttacccatt

SEQ ID NO: 7116 - DNA, 18 bp, Artificial Sequence
  Synthetic Polynucleotide
ttcaccaggaaaacttgc

SEQ ID NO: 7117 - DNA, 17 bp, Artificial Sequence
  Synthetic Polynucleotide
gcgtataagaggtcgtg

SEQ ID NO: 7118 - DNA, 20 bp, Artificial Sequence
  Synthetic Polynucleotide
gagacttcagtcgcaaacta

SEQ ID NO: 7119 - DNA, 19 bp, Artificial Sequence
  Synthetic Polynucleotide
tgaatacataggcaccctc

SEQ ID NO: 7120 - DNA, 20 bp, Artificial Sequence
  Synthetic Polynucleotide
ccgccattctatcataagaa

SEQ ID NO: 7121 - DNA, 19 bp, Artificial Sequence
  Synthetic Polynucleotide
accacgtctcatgtccacc

SEQ ID NO: 7122 - DNA, 20 bp, Artificial Sequence
  Synthetic Polynucleotide
cacacccagccccatactat

SEQ ID NO: 7123 - DNA, 17 bp, Artificial Sequence
  Synthetic Polynucleotide
gagcattccaacgcaaa

SEQ ID NO: 7124 - DNA, 17 bp, Artificial Sequence
  Synthetic Polynucleotide
cgcaataatgttctgca

SEQ ID NO: 7125 - DNA, 19 bp, Artificial Sequence
  Synthetic Polynucleotide
aatgtcccacgcaaactcc

SEQ ID NO: 7126 - DNA, 18 bp, Artificial Sequence
  Synthetic Polynucleotide
ctgatccgccaactcata

SEQ ID NO: 7127 - DNA, 20 bp, Artificial Sequence
  Synthetic Polynucleotide
ggaacagtttcatctttctc

SEQ ID NO: 7128 - DNA, 18 bp, Artificial Sequence
  Synthetic Polynucleotide
ggccaaacagaatcaaga

SEQ ID NO: 7129 - DNA, 19 bp, Artificial Sequence
  Synthetic Polynucleotide
cgccaagagtatcatgtaa

SEQ ID NO: 7130 - DNA, 17 bp, Artificial Sequence
  Synthetic Polynucleotide
aatcagtcgtccaacat

SEQ ID NO: 7131 - DNA, 20 bp, Artificial Sequence
  Synthetic Polynucleotide
ttttagctcactcagacata

SEQ ID NO: 7132 - DNA, 20 bp, Artificial Sequence
  Synthetic Polynucleotide
agggatctgtctaataacaa

SEQ ID NO: 7133 - DNA, 18 bp, Artificial Sequence
  Synthetic Polynucleotide
accttttcaccaaaccgt

SEQ ID NO: 7134 - DNA, 19 bp, Artificial Sequence
  Synthetic Polynucleotide
attttcacgtagttcaggt

SEQ ID NO: 7135 - DNA, 17 bp, Artificial Sequence
  Synthetic Polynucleotide
ccaagccttttcacacc

SEQ ID NO: 7136 - DNA, 17 bp, Artificial Sequence
  Synthetic Polynucleotide
actggaacaaggtgtct

SEQ ID NO: 7137 - DNA, 20 bp, Artificial Sequence
  Synthetic Polynucleotide
attcactttctttgccttct

SEQ ID NO: 7138 - DNA, 20 bp, Artificial Sequence
  Synthetic Polynucleotide
aaaattgaacgtggtgaagt

SEQ ID NO: 7139 - DNA, 20 bp, Artificial Sequence
  Synthetic Polynucleotide
cgtctgaagagtaatcaacc

SEQ ID NO: 7140 - DNA, 18 bp, Artificial Sequence
  Synthetic Polynucleotide
agcttaatggatggacga

SEQ ID NO: 7141 - DNA, 18 bp, Artificial Sequence
  Synthetic Polynucleotide
atcaaaacggtgaccaag

SEQ ID NO: 7142 - DNA, 17 bp, Artificial Sequence
  Synthetic Polynucleotide
tcaactgctgctatgaa

SEQ ID NO: 7143 - DNA, 17 bp, Artificial Sequence
  Synthetic Polynucleotide
cggtgttctcgcctaac

SEQ ID NO: 7144 - DNA, 20 bp, Artificial Sequence
  Synthetic Polynucleotide
ccagtgggttctcattgacg

SEQ ID NO: 7145 - DNA, 19 bp, Artificial Sequence
  Synthetic Polynucleotide
cacttccctttcctgaata

SEQ ID NO: 7146 - DNA, 19 bp, Artificial Sequence
  Synthetic Polynucleotide
agctaatgaccgcaaataa

SEQ ID NO: 7147 - DNA, 19 bp, Artificial Sequence
  Synthetic Polynucleotide
cttgttggtacattcccca

SEQ ID NO: 7148 - DNA, 19 bp, Artificial Sequence
  Synthetic Polynucleotide
atgcatcatcaactgtttc

SEQ ID NO: 7149 - DNA, 19 bp, Artificial Sequence
  Synthetic Polynucleotide
caagcatcactaattggat

SEQ ID NO: 7150 - DNA, 17 bp, Artificial Sequence
  Synthetic Polynucleotide
cgcatgtcggagtgagg

SEQ ID NO: 7151 - DNA, 18 bp, Artificial Sequence
  Synthetic Polynucleotide
ctagcctgatcatcatga

SEQ ID NO: 7152 - DNA, 18 bp, Artificial Sequence
  Synthetic Polynucleotide
cgtagcgaagatggacat

SEQ ID NO: 7153 - DNA, 20 bp, Artificial Sequence
  Synthetic Polynucleotide
ttctgatcattcacttgtac

SEQ ID NO: 7154 - DNA, 18 bp, Artificial Sequence
  Synthetic Polynucleotide
ttctcagtgtaagtggtg

SEQ ID NO: 7155 - DNA, 18 bp, Artificial Sequence
  Synthetic Polynucleotide
agtaagctggaggtacga

SEQ ID NO: 7156 - DNA, 18 bp, Artificial Sequence
  Synthetic Polynucleotide
tactcgggtttgaactca

SEQ ID NO: 7157 - DNA, 18 bp, Artificial Sequence
  Synthetic Polynucleotide
agattctcatttcgggta

SEQ ID NO: 7158 - DNA, 19 bp, Artificial Sequence
  Synthetic Polynucleotide
gagaaattctttctgctga

SEQ ID NO: 7159 - DNA, 20 bp, Artificial Sequence
  Synthetic Polynucleotide
cgtctataccttctaactcc

SEQ ID NO: 7160 - DNA, 20 bp, Artificial Sequence
  Synthetic Polynucleotide
cggcattgatttatcccatt

SEQ ID NO: 7161 - DNA, 18 bp, Artificial Sequence
  Synthetic Polynucleotide
cgaggtgataagtcccct

SEQ ID NO: 7162 - DNA, 17 bp, Artificial Sequence
  Synthetic Polynucleotide
tcggatgtgtttcgtgg

SEQ ID NO: 7163 - DNA, 17 bp, Artificial Sequence
  Synthetic Polynucleotide
cctgactgtctgattgg

SEQ ID NO: 7164 - DNA, 18 bp, Artificial Sequence
  Synthetic Polynucleotide
tgtgacctatgtaaagcc

SEQ ID NO: 7165 - DNA, 18 bp, Artificial Sequence
  Synthetic Polynucleotide
gcaacatggatctgctta

SEQ ID NO: 7166 - DNA, 17 bp, Artificial Sequence
  Synthetic Polynucleotide
cggaagaacccgaaaat

SEQ ID NO: 7167 - DNA, 19 bp, Artificial Sequence
  Synthetic Polynucleotide
atttaggattggagctgac

SEQ ID NO: 7168 - DNA, 20 bp, Artificial Sequence
  Synthetic Polynucleotide
cagttccagccatcaccaac

SEQ ID NO: 7169 - DNA, 19 bp, Artificial Sequence
  Synthetic Polynucleotide
acttcacctttgtcaactt

SEQ ID NO: 7170 - DNA, 18 bp, Artificial Sequence
  Synthetic Polynucleotide
atgatagaaacacgacca

SEQ ID NO: 7171 - DNA, 19 bp, Artificial Sequence
  Synthetic Polynucleotide
ctagacgacgaacacccat

SEQ ID NO: 7172 - DNA, 17 bp, Artificial Sequence
  Synthetic Polynucleotide
ggcgatgaattccctat

SEQ ID NO: 7173 - DNA, 18 bp, Artificial Sequence
  Synthetic Polynucleotide
tgcctgaacgaacggtac

SEQ ID NO: 7174 - DNA, 19 bp, Artificial Sequence
  Synthetic Polynucleotide
ataaccctcatccagtcgg

SEQ ID NO: 7175 - DNA, 20 bp, Artificial Sequence
  Synthetic Polynucleotide
acatggactagcaagcatat

SEQ ID NO: 7176 - DNA, 19 bp, Artificial Sequence
  Synthetic Polynucleotide
aacccctccatcaagtaga

SEQ ID NO: 7177 - DNA, 19 bp, Artificial Sequence
  Synthetic Polynucleotide
tacagtatgcacttcgaat

SEQ ID NO: 7178 - DNA, 19 bp, Artificial Sequence
  Synthetic Polynucleotide
gactttccaacaagggcga

SEQ ID NO: 7179 - DNA, 20 bp, Artificial Sequence
  Synthetic Polynucleotide
aagtattggcgatagattca

SEQ ID NO: 7180 - DNA, 18 bp, Artificial Sequence
  Synthetic Polynucleotide
tggcacattttcaagata

SEQ ID NO: 7181 - DNA, 17 bp, Artificial Sequence
  Synthetic Polynucleotide
agtactcatgacccgac

SEQ ID NO: 7182 - DNA, 20 bp, Artificial Sequence
  Synthetic Polynucleotide
cagagacattcataacagac

SEQ ID NO: 7183 - DNA, 20 bp, Artificial Sequence
  Synthetic Polynucleotide
acactcgtatacaacaccat

SEQ ID NO: 7184 - DNA, 17 bp, Artificial Sequence
  Synthetic Polynucleotide
acccctccacaatagaa

SEQ ID NO: 7185 - DNA, 18 bp, Artificial Sequence
  Synthetic Polynucleotide
ttccatccaccacttaga

SEQ ID NO: 7186 - DNA, 17 bp, Artificial Sequence
  Synthetic Polynucleotide
ctgagattcagaagcgg

SEQ ID NO: 7187 - DNA, 19 bp, Artificial Sequence
  Synthetic Polynucleotide
acatcaagttcaaaccacc

SEQ ID NO: 7188 - DNA, 17 bp, Artificial Sequence
  Synthetic Polynucleotide
ttacctgcggagttaag

SEQ ID NO: 7189 - DNA, 20 bp, Artificial Sequence
  Synthetic Polynucleotide
gggcaagttcattaaacaac

SEQ ID NO: 7190 - DNA, 19 bp, Artificial Sequence
  Synthetic Polynucleotide
cccctaacacattcaatag

SEQ ID NO: 7191 - DNA, 17 bp, Artificial Sequence
  Synthetic Polynucleotide
tcaccagataaatgcgt

SEQ ID NO: 7192 - DNA, 19 bp, Artificial Sequence
  Synthetic Polynucleotide
gccacagtatgatacattg

SEQ ID NO: 7193 - DNA, 20 bp, Artificial Sequence
  Synthetic Polynucleotide
taaagttattgattagcgtg

SEQ ID NO: 7194 - DNA, 18 bp, Artificial Sequence
  Synthetic Polynucleotide
caaagaaacgattcacgg

SEQ ID NO: 7195 - DNA, 19 bp, Artificial Sequence
  Synthetic Polynucleotide
tatgcaagtcgaaaataca

SEQ ID NO: 7196 - DNA, 18 bp, Artificial Sequence
  Synthetic Polynucleotide
ctttgacgagaaatcacg

SEQ ID NO: 7197 - DNA, 19 bp, Artificial Sequence
  Synthetic Polynucleotide
cgtcacaccaggttggtca

SEQ ID NO: 7198 - DNA, 17 bp, Artificial Sequence
  Synthetic Polynucleotide
tctaggtgttgttggat

SEQ ID NO: 7199 - DNA, 20 bp, Artificial Sequence
  Synthetic Polynucleotide
ctgaactagtcgcactaatg

SEQ ID NO: 7200 - DNA, 20 bp, Artificial Sequence
  Synthetic Polynucleotide
tctttggctgtaccttgttt

SEQ ID NO: 7201 - DNA, 18 bp, Artificial Sequence
  Synthetic Polynucleotide
tatcatcgctctatgctc

SEQ ID NO: 7202 - DNA, 20 bp, Artificial Sequence
  Synthetic Polynucleotide
catacccacaaaagatcata

SEQ ID NO: 7203 - DNA, 19 bp, Artificial Sequence
  Synthetic Polynucleotide
taaaactcatcctcaccgc

SEQ ID NO: 7204 - DNA, 17 bp, Artificial Sequence
  Synthetic Polynucleotide
agcggagaaggctgcat

SEQ ID NO: 7205 - DNA, 20 bp, Artificial Sequence
  Synthetic Polynucleotide
ttgctctttcattagaatcc

SEQ ID NO: 7206 - DNA, 20 bp, Artificial Sequence
  Synthetic Polynucleotide
atagaatggggtcggtttat

SEQ ID NO: 7207 - DNA, 19 bp, Artificial Sequence
  Synthetic Polynucleotide
gcctgatgaattgtctgtg

SEQ ID NO: 7208 - DNA, 17 bp, Artificial Sequence
  Synthetic Polynucleotide
tgcaaagatggggaacg

SEQ ID NO: 7209 - DNA, 19 bp, Artificial Sequence
  Synthetic Polynucleotide
tgagagtctttcctgatgc

SEQ ID NO: 7210 - DNA, 20 bp, Artificial Sequence
  Synthetic Polynucleotide
tatcactacattcgcaactc

SEQ ID NO: 7211 - DNA, 17 bp, Artificial Sequence
  Synthetic Polynucleotide
tcacgcatgtctatctt

SEQ ID NO: 7212 - DNA, 17 bp, Artificial Sequence
  Synthetic Polynucleotide
actatggcttcctcact

SEQ ID NO: 7213 - DNA, 19 bp, Artificial Sequence
  Synthetic Polynucleotide
tattcagtggacacacttt

SEQ ID NO: 7214 - DNA, 19 bp, Artificial Sequence
  Synthetic Polynucleotide
aggatcaatggacactgta

SEQ ID NO: 7215 - DNA, 20 bp, Artificial Sequence
  Synthetic Polynucleotide
cctcgcaggtaatcatgtct

SEQ ID NO: 7216 - DNA, 18 bp, Artificial Sequence
  Synthetic Polynucleotide
tccctatggataatcaga

SEQ ID NO: 7217 - DNA, 20 bp, Artificial Sequence
  Synthetic Polynucleotide
gacttatcacatatccgatg

SEQ ID NO: 7218 - DNA, 20 bp, Artificial Sequence
  Synthetic Polynucleotide
cgaagaaaagtatcgttcta

SEQ ID NO: 7219 - DNA, 19 bp, Artificial Sequence
  Synthetic Polynucleotide
catttcctccacggctacc

SEQ ID NO: 7220 - DNA, 19 bp, Artificial Sequence
  Synthetic Polynucleotide
tcacgaactatatggatcc

SEQ ID NO: 7221 - DNA, 20 bp, Artificial Sequence
  Synthetic Polynucleotide
tacattcagaagtttagtca

SEQ ID NO: 7222 - DNA, 20 bp, Artificial Sequence
  Synthetic Polynucleotide
tggagctaactttaatcgat

SEQ ID NO: 7223 - DNA, 19 bp, Artificial Sequence
  Synthetic Polynucleotide
gtttccgatatggacacag

SEQ ID NO: 7224 - DNA, 18 bp, Artificial Sequence
  Synthetic Polynucleotide
aagtcgcacaagataccc

SEQ ID NO: 7225 - DNA, 20 bp, Artificial Sequence
  Synthetic Polynucleotide
tcgtaggttggagtttgtga

SEQ ID NO: 7226 - DNA, 18 bp, Artificial Sequence
  Synthetic Polynucleotide
gatgcgaggcaagagtta

SEQ ID NO: 7227 - DNA, 18 bp, Artificial Sequence
  Synthetic Polynucleotide
actgctgagttcggtctg

SEQ ID NO: 7228 - DNA, 19 bp, Artificial Sequence
  Synthetic Polynucleotide
atgaagatatgtggagtgg

SEQ ID NO: 7229 - DNA, 19 bp, Artificial Sequence
  Synthetic Polynucleotide
gtaaccgctttgacgtaac

SEQ ID NO: 7230 - DNA, 20 bp, Artificial Sequence
  Synthetic Polynucleotide
cgaatacataccagatagtg

SEQ ID NO: 7231 - DNA, 20 bp, Artificial Sequence
  Synthetic Polynucleotide
tctgagaggtaggttccggt

SEQ ID NO: 7232 - DNA, 19 bp, Artificial Sequence
  Synthetic Polynucleotide
gcagatgacgttcgtattg

SEQ ID NO: 7233 - DNA, 19 bp, Artificial Sequence
  Synthetic Polynucleotide
ctgcatgttcccaatcatg

SEQ ID NO: 7234 - DNA, 20 bp, Artificial Sequence
  Synthetic Polynucleotide
tgaaatggtagatgaaacaa

SEQ ID NO: 7235 - DNA, 17 bp, Artificial Sequence
  Synthetic Polynucleotide
tgtgacgctgagtcctt

SEQ ID NO: 7236 - DNA, 19 bp, Artificial Sequence
  Synthetic Polynucleotide
caagttgagtcattggata

SEQ ID NO: 7237 - DNA, 18 bp, Artificial Sequence
  Synthetic Polynucleotide
tacccgctgctaaattat

SEQ ID NO: 7238 - DNA, 20 bp, Artificial Sequence
  Synthetic Polynucleotide
tataggtgtaaagaagaggg

SEQ ID NO: 7239 - DNA, 19 bp, Artificial Sequence
  Synthetic Polynucleotide
tcttcctttccccaagaat

SEQ ID NO: 7240 - DNA, 19 bp, Artificial Sequence
  Synthetic Polynucleotide
aaagatgaggatggacaag

SEQ ID NO: 7241 - DNA, 19 bp, Artificial Sequence
  Synthetic Polynucleotide
ttgggcattctgaaacgac

SEQ ID NO: 7242 - DNA, 20 bp, Artificial Sequence
  Synthetic Polynucleotide
gaaaagtttaaaggtagggt

SEQ ID NO: 7243 - DNA, 19 bp, Artificial Sequence
  Synthetic Polynucleotide
cacattgaaacgacttaga

SEQ ID NO: 7244 - DNA, 20 bp, Artificial Sequence
  Synthetic Polynucleotide
tatgtcggatgatgttaata

SEQ ID NO: 7245 - DNA, 18 bp, Artificial Sequence
  Synthetic Polynucleotide
gagtttgagagaagcaag

SEQ ID NO: 7246 - DNA, 18 bp, Artificial Sequence
  Synthetic Polynucleotide
ggtgagattaaacggatg

SEQ ID NO: 7247 - DNA, 20 bp, Artificial Sequence
  Synthetic Polynucleotide
ttgtggagattgatgatcca

SEQ ID NO: 7248 - DNA, 18 bp, Artificial Sequence
  Synthetic Polynucleotide
cttggtggctattctaga

SEQ ID NO: 7249 - DNA, 18 bp, Artificial Sequence
  Synthetic Polynucleotide
cgtctttaggtggatagc

SEQ ID NO: 7250 - DNA, 17 bp, Artificial Sequence
  Synthetic Polynucleotide
tgggcttgtgctgaatt

SEQ ID NO: 7251 - DNA, 20 bp, Artificial Sequence
  Synthetic Polynucleotide
ttcaacagtaggaatgtagt

SEQ ID NO: 7252 - DNA, 20 bp, Artificial Sequence
  Synthetic Polynucleotide
ttgtcaggtaagtgtctaat

SEQ ID NO: 7253 - DNA, 19 bp, Artificial Sequence
  Synthetic Polynucleotide
tattctttgtgtgtggaac

SEQ ID NO: 7254 - DNA, 19 bp, Artificial Sequence
  Synthetic Polynucleotide
cggtcttatcgaaagttca

SEQ ID NO: 7255 - DNA, 19 bp, Artificial Sequence
  Synthetic Polynucleotide
gttatcctcatcgtttgct

SEQ ID NO: 7256 - DNA, 17 bp, Artificial Sequence
  Synthetic Polynucleotide
ccatctcacactcactg

SEQ ID NO: 7257 - DNA, 18 bp, Artificial Sequence
  Synthetic Polynucleotide
aaatgccgtcgtccaaaa

SEQ ID NO: 7258 - DNA, 19 bp, Artificial Sequence
  Synthetic Polynucleotide
tgcaggaaagagcgtaaga

SEQ ID NO: 7259 - DNA, 17 bp, Artificial Sequence
  Synthetic Polynucleotide
gtagacagcgttgaata

SEQ ID NO: 7260 - DNA, 17 bp, Artificial Sequence
  Synthetic Polynucleotide
aactcaagcgggtaggg

SEQ ID NO: 7261 - DNA, 20 bp, Artificial Sequence
  Synthetic Polynucleotide
agtcacttcgacaatcgttt

SEQ ID NO: 7262 - DNA, 18 bp, Artificial Sequence
  Synthetic Polynucleotide
atgaagaacagtctgacc

SEQ ID NO: 7263 - DNA, 17 bp, Artificial Sequence
  Synthetic Polynucleotide
tgcatgataaaggggtc

SEQ ID NO: 7264 - DNA, 20 bp, Artificial Sequence
  Synthetic Polynucleotide
aacagttggagtttcttggc

SEQ ID NO: 7265 - DNA, 19 bp, Artificial Sequence
  Synthetic Polynucleotide
cgtaactcggatcgtttgt

SEQ ID NO: 7266 - DNA, 19 bp, Artificial Sequence
  Synthetic Polynucleotide
atatctgaatcgagcgttt

SEQ ID NO: 7267 - DNA, 17 bp, Artificial Sequence
  Synthetic Polynucleotide
gaccacaatagggttcc

SEQ ID NO: 7268 - DNA, 20 bp, Artificial Sequence
  Synthetic Polynucleotide
gtgcgtatgctatcgaaatc

SEQ ID NO: 7269 - DNA, 18 bp, Artificial Sequence
  Synthetic Polynucleotide
ggcaacacaaaccataag

SEQ ID NO: 7270 - DNA, 19 bp, Artificial Sequence
  Synthetic Polynucleotide
cgaacataatgaacagagc

SEQ ID NO: 7271 - DNA, 20 bp, Artificial Sequence
  Synthetic Polynucleotide
tccataaatgcctaacaatt

SEQ ID NO: 7272 - DNA, 19 bp, Artificial Sequence
  Synthetic Polynucleotide
ctgtcacaaatgcaagaat

SEQ ID NO: 7273 - DNA, 17 bp, Artificial Sequence
  Synthetic Polynucleotide
ggtttagccatcccacg

SEQ ID NO: 7274 - DNA, 20 bp, Artificial Sequence
  Synthetic Polynucleotide
ccatcgtttcatcctacttc

SEQ ID NO: 7275 - DNA, 20 bp, Artificial Sequence
  Synthetic Polynucleotide
cctgaacagaaataacgggt

SEQ ID NO: 7276 - DNA, 20 bp, Artificial Sequence
  Synthetic Polynucleotide
taagagttatactgggaaag

SEQ ID NO: 7277 - DNA, 20 bp, Artificial Sequence
  Synthetic Polynucleotide
gtgataacacttctccatga

SEQ ID NO: 7278 - DNA, 20 bp, Artificial Sequence
  Synthetic Polynucleotide
taaatgccttctgaatgatc

SEQ ID NO: 7279 - DNA, 18 bp, Artificial Sequence
  Synthetic Polynucleotide
tcgaatggatacacagaa

SEQ ID NO: 7280 - DNA, 18 bp, Artificial Sequence
  Synthetic Polynucleotide
cacatcaacacacctaga

SEQ ID NO: 7281 - DNA, 20 bp, Artificial Sequence
  Synthetic Polynucleotide
tcttttcaagtccctgacca

SEQ ID NO: 7282 - DNA, 19 bp, Artificial Sequence
  Synthetic Polynucleotide
gcaacaacagtccatcact

SEQ ID NO: 7283 - DNA, 20 bp, Artificial Sequence
  Synthetic Polynucleotide
tcatcaagtacagtccagaa

SEQ ID NO: 7284 - DNA, 17 bp, Artificial Sequence
  Synthetic Polynucleotide
aacccaatccaccacag

SEQ ID NO: 7285 - DNA, 19 bp, Artificial Sequence
  Synthetic Polynucleotide
atgcatcgccatactgggt

SEQ ID NO: 7286 - DNA, 19 bp, Artificial Sequence
  Synthetic Polynucleotide
tggcatctccaatagttat

SEQ ID NO: 7287 - DNA, 18 bp, Artificial Sequence
  Synthetic Polynucleotide
tatcgggtttcttccatt

SEQ ID NO: 7288 - DNA, 17 bp, Artificial Sequence
  Synthetic Polynucleotide
atctcatgcgtaccaat

SEQ ID NO: 7289 - DNA, 20 bp, Artificial Sequence
  Synthetic Polynucleotide
gacaaatgatagcataccac

SEQ ID NO: 7290 - DNA, 17 bp, Artificial Sequence
  Synthetic Polynucleotide
gccccatcataagtgca

SEQ ID NO: 7291 - DNA, 19 bp, Artificial Sequence
  Synthetic Polynucleotide
gttgcctcagctagaattc

SEQ ID NO: 7292 - DNA, 17 bp, Artificial Sequence
  Synthetic Polynucleotide
gctgttccaatcgacta

SEQ ID NO: 7293 - DNA, 19 bp, Artificial Sequence
  Synthetic Polynucleotide
gacgtgctaacactaaata

SEQ ID NO: 7294 - DNA, 19 bp, Artificial Sequence
  Synthetic Polynucleotide
gcaccacagaatagagcag

SEQ ID NO: 7295 - DNA, 18 bp, Artificial Sequence
  Synthetic Polynucleotide
ggtcgtctcttgacaatt

SEQ ID NO: 7296 - DNA, 20 bp, Artificial Sequence
  Synthetic Polynucleotide
tcagacctccagaactccaa

SEQ ID NO: 7297 - DNA, 17 bp, Artificial Sequence
  Synthetic Polynucleotide
gcggtcattcccacaac

SEQ ID NO: 7298 - DNA, 19 bp, Artificial Sequence
  Synthetic Polynucleotide
atgatatcggctgtttcag

SEQ ID NO: 7299 - DNA, 17 bp, Artificial Sequence
  Synthetic Polynucleotide
gacaaaccttggccccg

SEQ ID NO: 7300 - DNA, 18 bp, Artificial Sequence
  Synthetic Polynucleotide
atgaaaggaaagcggttc

SEQ ID NO: 7301 - DNA, 19 bp, Artificial Sequence
  Synthetic Polynucleotide
acgtcagtacatatccaca

SEQ ID NO: 7302 - DNA, 20 bp, Artificial Sequence
  Synthetic Polynucleotide
tcatcttggcattttcatgc

SEQ ID NO: 7303 - DNA, 19 bp, Artificial Sequence
  Synthetic Polynucleotide
ctttgcggtatcgtcttct

SEQ ID NO: 7304 - DNA, 20 bp, Artificial Sequence
  Synthetic Polynucleotide
tcagactgtattaccaacat

SEQ ID NO: 7305 - DNA, 19 bp, Artificial Sequence
  Synthetic Polynucleotide
gtgttccagaacttcgcct

SEQ ID NO: 7306 - DNA, 20 bp, Artificial Sequence
  Synthetic Polynucleotide
tgcaatactaacaacgaaca

SEQ ID NO: 7307 - DNA, 18 bp, Artificial Sequence
  Synthetic Polynucleotide
aattcaccttgatcccca

SEQ ID NO: 7308 - DNA, 18 bp, Artificial Sequence
  Synthetic Polynucleotide
gagagaaaggaatttgcg

SEQ ID NO: 7309 - DNA, 18 bp, Artificial Sequence
  Synthetic Polynucleotide
tccaaccttccaataaca

SEQ ID NO: 7310 - DNA, 18 bp, Artificial Sequence
  Synthetic Polynucleotide
tgatcgttccctcgaaat

SEQ ID NO: 7311 - DNA, 19 bp, Artificial Sequence
  Synthetic Polynucleotide
tcgtcctcatcatctccca

SEQ ID NO: 7312 - DNA, 19 bp, Artificial Sequence
  Synthetic Polynucleotide
ttcagactattttgcttcg

SEQ ID NO: 7313 - DNA, 18 bp, Artificial Sequence
  Synthetic Polynucleotide
atctaaagcaggacagtt

SEQ ID NO: 7314 - DNA, 17 bp, Artificial Sequence
  Synthetic Polynucleotide
gtcacatcatccagggt

SEQ ID NO: 7315 - DNA, 18 bp, Artificial Sequence
  Synthetic Polynucleotide
ataaaccagcgagaaacg

SEQ ID NO: 7316 - DNA, 19 bp, Artificial Sequence
  Synthetic Polynucleotide
gctttctctttcggagttt

SEQ ID NO: 7317 - DNA, 18 bp, Artificial Sequence
  Synthetic Polynucleotide
ctccaagtatcttgcacc

SEQ ID NO: 7318 - DNA, 19 bp, Artificial Sequence
  Synthetic Polynucleotide
gagattggtgagaggacac

SEQ ID NO: 7319 - DNA, 19 bp, Artificial Sequence
  Synthetic Polynucleotide
gcatttcctcctactccct

SEQ ID NO: 7320 - DNA, 20 bp, Artificial Sequence
  Synthetic Polynucleotide
agcaacgagtgatgacagca

SEQ ID NO: 7321 - DNA, 18 bp, Artificial Sequence
  Synthetic Polynucleotide
ttgctcctttgtgaagcc

SEQ ID NO: 7322 - DNA, 18 bp, Artificial Sequence
  Synthetic Polynucleotide
taaatcccgtccatctgg

SEQ ID NO: 7323 - DNA, 19 bp, Artificial Sequence
  Synthetic Polynucleotide
tttacgattgacagcgttt

SEQ ID NO: 7324 - DNA, 20 bp, Artificial Sequence
  Synthetic Polynucleotide
ctattcagtattaacgccca

SEQ ID NO: 7325 - DNA, 20 bp, Artificial Sequence
  Synthetic Polynucleotide
agatttcgttccattcatct

SEQ ID NO: 7326 - DNA, 19 bp, Artificial Sequence
  Synthetic Polynucleotide
tggaacatccaaacgacca

SEQ ID NO: 7327 - DNA, 17 bp, Artificial Sequence
  Synthetic Polynucleotide
aaagagtacccgcccag

SEQ ID NO: 7328 - DNA, 19 bp, Artificial Sequence
  Synthetic Polynucleotide
ctcttcccaaaataccctc

SEQ ID NO: 7329 - DNA, 18 bp, Artificial Sequence
  Synthetic Polynucleotide
cttgaaacttccagcagt

SEQ ID NO: 7330 - DNA, 19 bp, Artificial Sequence
  Synthetic Polynucleotide
gagcttgttatgtatggca

SEQ ID NO: 7331 - DNA, 20 bp, Artificial Sequence
  Synthetic Polynucleotide
gtatgtgaacaacaaccaga

SEQ ID NO: 7332 - DNA, 17 bp, Artificial Sequence
  Synthetic Polynucleotide
tcccatctctagcatcc

SEQ ID NO: 7333 - DNA, 19 bp, Artificial Sequence
  Synthetic Polynucleotide
catctttccaaataaccca

SEQ ID NO: 7334 - DNA, 17 bp, Artificial Sequence
  Synthetic Polynucleotide
taagtccagcgaataga

SEQ ID NO: 7335 - DNA, 20 bp, Artificial Sequence
  Synthetic Polynucleotide
ttgtatctctttgagacacc

SEQ ID NO: 7336 - DNA, 19 bp, Artificial Sequence
  Synthetic Polynucleotide
caggctctgattatgtata

SEQ ID NO: 7337 - DNA, 20 bp, Artificial Sequence
  Synthetic Polynucleotide
accgcctaaaatccaattgt

SEQ ID NO: 7338 - DNA, 19 bp, Artificial Sequence
  Synthetic Polynucleotide
cattccattttcaatgccc

SEQ ID NO: 7339 - DNA, 19 bp, Artificial Sequence
  Synthetic Polynucleotide
ggtctatgaccagcatgag

SEQ ID NO: 7340 - DNA, 19 bp, Artificial Sequence
  Synthetic Polynucleotide
ggcacctaaatttacccga

SEQ ID NO: 7341 - DNA, 17 bp, Artificial Sequence
  Synthetic Polynucleotide
tcaactgtttgcgatcc

SEQ ID NO: 7342 - DNA, 18 bp, Artificial Sequence
  Synthetic Polynucleotide
ttgacgatatccctgatg

SEQ ID NO: 7343 - DNA, 17 bp, Artificial Sequence
  Synthetic Polynucleotide
cagcacggctatcaaga

SEQ ID NO: 7344 - DNA, 20 bp, Artificial Sequence
  Synthetic Polynucleotide
atgtcagttttaataccgac

SEQ ID NO: 7345 - DNA, 19 bp, Artificial Sequence
  Synthetic Polynucleotide
tctttcagcttgtgtcgcc

SEQ ID NO: 7346 - DNA, 20 bp, Artificial Sequence
  Synthetic Polynucleotide
gctaaatgaatacaaagcta

SEQ ID NO: 7347 - DNA, 19 bp, Artificial Sequence
  Synthetic Polynucleotide
gcgtgtgctctgaatgtat

SEQ ID NO: 7348 - DNA, 20 bp, Artificial Sequence
  Synthetic Polynucleotide
gcgttacaaacagaggaaga

SEQ ID NO: 7349 - DNA, 20 bp, Artificial Sequence
  Synthetic Polynucleotide
tcttcgagtctcacctactc

SEQ ID NO: 7350 - DNA, 20 bp, Artificial Sequence
  Synthetic Polynucleotide
gttcatcagatttccgataa

SEQ ID NO: 7351 - DNA, 20 bp, Artificial Sequence
  Synthetic Polynucleotide
gtcaggttcatcaggaatct

SEQ ID NO: 7352 - DNA, 19 bp, Artificial Sequence
  Synthetic Polynucleotide
acctgtatccagtcattac

SEQ ID NO: 7353 - DNA, 18 bp, Artificial Sequence
  Synthetic Polynucleotide
ggtctcatcatttcggtt

SEQ ID NO: 7354 - DNA, 20 bp, Artificial Sequence
  Synthetic Polynucleotide
ccctggtttatcaaagcaaa

SEQ ID NO: 7355 - DNA, 19 bp, Artificial Sequence
  Synthetic Polynucleotide
tacttgccttccgatttcc

SEQ ID NO: 7356 - DNA, 20 bp, Artificial Sequence
  Synthetic Polynucleotide
aagacccgcatgtacaacac

SEQ ID NO: 7357 - DNA, 20 bp, Artificial Sequence
  Synthetic Polynucleotide
cgacttgtgtgtattaactg

SEQ ID NO: 7358 - DNA, 20 bp, Artificial Sequence
  Synthetic Polynucleotide
tgattgactctaactccaag

SEQ ID NO: 7359 - DNA, 18 bp, Artificial Sequence
  Synthetic Polynucleotide
ctcccactaccaattgct

SEQ ID NO: 7360 - DNA, 20 bp, Artificial Sequence
  Synthetic Polynucleotide
ggaattaaaagagaggagcg

SEQ ID NO: 7361 - DNA, 20 bp, Artificial Sequence
  Synthetic Polynucleotide
gtaggaatttgcatcgctgg

SEQ ID NO: 7362 - DNA, 20 bp, Artificial Sequence
  Synthetic Polynucleotide
agtcccgctagatggtttcg

SEQ ID NO: 7363 - DNA, 18 bp, Artificial Sequence
  Synthetic Polynucleotide
aggaggtcattacgttgg

SEQ ID NO: 7364 - DNA, 18 bp, Artificial Sequence
  Synthetic Polynucleotide
cgttcattgcccagttgc

SEQ ID NO: 7365 - DNA, 18 bp, Artificial Sequence
  Synthetic Polynucleotide
attcagtctttcccttca

SEQ ID NO: 7366 - DNA, 19 bp, Artificial Sequence
  Synthetic Polynucleotide
tatctcggctacccctatc

SEQ ID NO: 7367 - DNA, 20 bp, Artificial Sequence
  Synthetic Polynucleotide
taagcccttaacatattccc

SEQ ID NO: 7368 - DNA, 20 bp, Artificial Sequence
  Synthetic Polynucleotide
tcaaagatagtttccttccg

SEQ ID NO: 7369 - DNA, 19 bp, Artificial Sequence
  Synthetic Polynucleotide
tcccgtacaatctaaactt

SEQ ID NO: 7370 - DNA, 18 bp, Artificial Sequence
  Synthetic Polynucleotide
tcgtgttcctaagattga

SEQ ID NO: 7371 - DNA, 20 bp, Artificial Sequence
  Synthetic Polynucleotide
tttcgatatcacctcgcatt

SEQ ID NO: 7372 - DNA, 20 bp, Artificial Sequence
  Synthetic Polynucleotide
ttagatccacttaccaaagt

SEQ ID NO: 7373 - DNA, 18 bp, Artificial Sequence
  Synthetic Polynucleotide
ctgctgtatttccccggc

SEQ ID NO: 7374 - DNA, 17 bp, Artificial Sequence
  Synthetic Polynucleotide
cccgcttcaaacataga

SEQ ID NO: 7375 - DNA, 20 bp, Artificial Sequence
  Synthetic Polynucleotide
gtaactcaaggtggtatgcc

SEQ ID NO: 7376 - DNA, 20 bp, Artificial Sequence
  Synthetic Polynucleotide
tatcatcgttttatcctctg

SEQ ID NO: 7377 - DNA, 19 bp, Artificial Sequence
  Synthetic Polynucleotide
ggtaacatgcgtacaggat

SEQ ID NO: 7378 - DNA, 20 bp, Artificial Sequence
  Synthetic Polynucleotide
ccatttcctttgtcacacgt

SEQ ID NO: 7379 - DNA, 19 bp, Artificial Sequence
  Synthetic Polynucleotide
cttcgtaacaatcatacga

SEQ ID NO: 7380 - DNA, 18 bp, Artificial Sequence
  Synthetic Polynucleotide
gtgaagcgagaagcaacg

SEQ ID NO: 7381 - DNA, 19 bp, Artificial Sequence
  Synthetic Polynucleotide
atctgctgatttaagccta

SEQ ID NO: 7382 - DNA, 18 bp, Artificial Sequence
  Synthetic Polynucleotide
cgctgatgcgtagtcgta

SEQ ID NO: 7383 - DNA, 19 bp, Artificial Sequence
  Synthetic Polynucleotide
actggaaccaacattgcgt

SEQ ID NO: 7384 - DNA, 19 bp, Artificial Sequence
  Synthetic Polynucleotide
tgatcgaagagtggagagc

SEQ ID NO: 7385 - DNA, 18 bp, Artificial Sequence
  Synthetic Polynucleotide
aggtacttttaggtgcgg

SEQ ID NO: 7386 - DNA, 20 bp, Artificial Sequence
  Synthetic Polynucleotide
ccgtcattctggactttaaa

SEQ ID NO: 7387 - DNA, 20 bp, Artificial Sequence
  Synthetic Polynucleotide
tacgttcaaaaccaatatgt

SEQ ID NO: 7388 - DNA, 19 bp, Artificial Sequence
  Synthetic Polynucleotide
acttgatgaagatgacccg

SEQ ID NO: 7389 - DNA, 19 bp, Artificial Sequence
  Synthetic Polynucleotide
cacttttgggagtcaaatc

SEQ ID NO: 7390 - DNA, 18 bp, Artificial Sequence
  Synthetic Polynucleotide
agcattgtcggccttacc

SEQ ID NO: 7391 - DNA, 18 bp, Artificial Sequence
  Synthetic Polynucleotide
cagctttacccgtggcgt

SEQ ID NO: 7392 - DNA, 20 bp, Artificial Sequence
  Synthetic Polynucleotide
ttgctggacttatctttgcc

SEQ ID NO: 7393 - DNA, 20 bp, Artificial Sequence
  Synthetic Polynucleotide
gagtagtcaaattgtcggct

SEQ ID NO: 7394 - DNA, 20 bp, Artificial Sequence
  Synthetic Polynucleotide
cggttagttcaactcatagt

SEQ ID NO: 7395 - DNA, 18 bp, Artificial Sequence
  Synthetic Polynucleotide
aaatcaaattgctgtgga

SEQ ID NO: 7396 - DNA, 19 bp, Artificial Sequence
  Synthetic Polynucleotide
actagccatagtgaatacg

SEQ ID NO: 7397 - DNA, 19 bp, Artificial Sequence
  Synthetic Polynucleotide
gatcgaccctaacttctat

SEQ ID NO: 7398 - DNA, 18 bp, Artificial Sequence
  Synthetic Polynucleotide
tgaatttcaacagtgggc

SEQ ID NO: 7399 - DNA, 17 bp, Artificial Sequence
  Synthetic Polynucleotide
acaggacagggactggc

SEQ ID NO: 7400 - DNA, 18 bp, Artificial Sequence
  Synthetic Polynucleotide
tcatacgtcatttgtgct

SEQ ID NO: 7401 - DNA, 18 bp, Artificial Sequence
  Synthetic Polynucleotide
cggaagtagtaacaacgt

SEQ ID NO: 7402 - DNA, 19 bp, Artificial Sequence
  Synthetic Polynucleotide
cgaagaaatattactggcg

SEQ ID NO: 7403 - DNA, 18 bp, Artificial Sequence
  Synthetic Polynucleotide
gagacctcaacgtctaga

SEQ ID NO: 7404 - DNA, 18 bp, Artificial Sequence
  Synthetic Polynucleotide
tgtcttgtattgtcggca

SEQ ID NO: 7405 - DNA, 20 bp, Artificial Sequence
  Synthetic Polynucleotide
tatattgcattgagcatggg

SEQ ID NO: 7406 - DNA, 19 bp, Artificial Sequence
  Synthetic Polynucleotide
ttcatcacaaatcacgatg

SEQ ID NO: 7407 - DNA, 17 bp, Artificial Sequence
  Synthetic Polynucleotide
caccattagcacacgaa

SEQ ID NO: 7408 - DNA, 20 bp, Artificial Sequence
  Synthetic Polynucleotide
tttgaacagagtacgataca

SEQ ID NO: 7409 - DNA, 20 bp, Artificial Sequence
  Synthetic Polynucleotide
ccaagcactcaacctcctct

SEQ ID NO: 7410 - DNA, 17 bp, Artificial Sequence
  Synthetic Polynucleotide
gtctgagcgggtttgtt

SEQ ID NO: 7411 - DNA, 20 bp, Artificial Sequence
  Synthetic Polynucleotide
gttgacttaacaaccacact

SEQ ID NO: 7412 - DNA, 19 bp, Artificial Sequence
  Synthetic Polynucleotide
aacacatctgaagctgtca

SEQ ID NO: 7413 - DNA, 17 bp, Artificial Sequence
  Synthetic Polynucleotide
ttagcatgtctgaacgc

SEQ ID NO: 7414 - DNA, 20 bp, Artificial Sequence
  Synthetic Polynucleotide
tggataggaacgactcacgc

SEQ ID NO: 7415 - DNA, 20 bp, Artificial Sequence
  Synthetic Polynucleotide
agttgtgtaactacgtctat

SEQ ID NO: 7416 - DNA, 20 bp, Artificial Sequence
  Synthetic Polynucleotide
tagatgccagtcttgaacac

SEQ ID NO: 7417 - DNA, 18 bp, Artificial Sequence
  Synthetic Polynucleotide
agtgatatacctttcccg

SEQ ID NO: 7418 - DNA, 20 bp, Artificial Sequence
  Synthetic Polynucleotide
ttaaagatgggaacgatgag

SEQ ID NO: 7419 - DNA, 19 bp, Artificial Sequence
  Synthetic Polynucleotide
aagcaacaccaattagatc

SEQ ID NO: 7420 - DNA, 20 bp, Artificial Sequence
  Synthetic Polynucleotide
aaacgattagagttggaaaa

SEQ ID NO: 7421 - DNA, 20 bp, Artificial Sequence
  Synthetic Polynucleotide
ctgccattattgagttagtc

SEQ ID NO: 7422 - DNA, 17 bp, Artificial Sequence
  Synthetic Polynucleotide
atcagcacccacaattg

SEQ ID NO: 7423 - DNA, 20 bp, Artificial Sequence
  Synthetic Polynucleotide
acataacatactgacctctt

SEQ ID NO: 7424 - DNA, 19 bp, Artificial Sequence
  Synthetic Polynucleotide
caattgcataacgagaaag

SEQ ID NO: 7425 - DNA, 20 bp, Artificial Sequence
  Synthetic Polynucleotide
catcatatctaagcacatga

SEQ ID NO: 7426 - DNA, 17 bp, Artificial Sequence
  Synthetic Polynucleotide
tgtgccactttacaaga

SEQ ID NO: 7427 - DNA, 19 bp, Artificial Sequence
  Synthetic Polynucleotide
agtacacctatgatacgga

SEQ ID NO: 7428 - DNA, 20 bp, Artificial Sequence
  Synthetic Polynucleotide
ttgaaagaaagtctgaagcc

SEQ ID NO: 7429 - DNA, 19 bp, Artificial Sequence
  Synthetic Polynucleotide
tcttctctccattcaacta

SEQ ID NO: 7430 - DNA, 18 bp, Artificial Sequence
  Synthetic Polynucleotide
gagatggaactgcacctt

SEQ ID NO: 7431 - DNA, 20 bp, Artificial Sequence
  Synthetic Polynucleotide
atatgtctaagtttaaccgg

SEQ ID NO: 7432 - DNA, 20 bp, Artificial Sequence
  Synthetic Polynucleotide
gtaacctccaagttcataat

SEQ ID NO: 7433 - DNA, 19 bp, Artificial Sequence
  Synthetic Polynucleotide
tgcaaatttcttctcttcc

SEQ ID NO: 7434 - DNA, 17 bp, Artificial Sequence
  Synthetic Polynucleotide
acagaaacgaacaaggg

SEQ ID NO: 7435 - DNA, 19 bp, Artificial Sequence
  Synthetic Polynucleotide
cgcagtttgaaggaggcat

SEQ ID NO: 7436 - DNA, 19 bp, Artificial Sequence
  Synthetic Polynucleotide
agtgctttggccctcgtag

SEQ ID NO: 7437 - DNA, 20 bp, Artificial Sequence
  Synthetic Polynucleotide
aagaatatagtggaagggtg

SEQ ID NO: 7438 - DNA, 19 bp, Artificial Sequence
  Synthetic Polynucleotide
aatcgcccaagtatatggt

SEQ ID NO: 7439 - DNA, 20 bp, Artificial Sequence
  Synthetic Polynucleotide
ctaatctttctgcatgagac

SEQ ID NO: 7440 - DNA, 18 bp, Artificial Sequence
  Synthetic Polynucleotide
taaattgcacgtcggtcc

SEQ ID NO: 7441 - DNA, 19 bp, Artificial Sequence
  Synthetic Polynucleotide
atacattcagcgttaacct

SEQ ID NO: 7442 - DNA, 18 bp, Artificial Sequence
  Synthetic Polynucleotide
agcggtaagtcttggttg

SEQ ID NO: 7443 - DNA, 18 bp, Artificial Sequence
  Synthetic Polynucleotide
tagtgtggcaggtcgtac

SEQ ID NO: 7444 - DNA, 20 bp, Artificial Sequence
  Synthetic Polynucleotide
gttgagaaacaaatgtctgc

SEQ ID NO: 7445 - DNA, 20 bp, Artificial Sequence
  Synthetic Polynucleotide
cgttcatctacctctcataa

SEQ ID NO: 7446 - DNA, 20 bp, Artificial Sequence
  Synthetic Polynucleotide
caatctaagtggtctgctaa

SEQ ID NO: 7447 - DNA, 17 bp, Artificial Sequence
  Synthetic Polynucleotide
gtcacctcgggttagga

SEQ ID NO: 7448 - DNA, 19 bp, Artificial Sequence
  Synthetic Polynucleotide
gactggtgttaagtatcgc

SEQ ID NO: 7449 - DNA, 18 bp, Artificial Sequence
  Synthetic Polynucleotide
tagaagatgtttagccct

SEQ ID NO: 7450 - DNA, 20 bp, Artificial Sequence
  Synthetic Polynucleotide
agagtccgttctatgtgatt

SEQ ID NO: 7451 - DNA, 19 bp, Artificial Sequence
  Synthetic Polynucleotide
taatgtcatcaagaatcgg

SEQ ID NO: 7452 - DNA, 19 bp, Artificial Sequence
  Synthetic Polynucleotide
cggagatacgtcatcactt

SEQ ID NO: 7453 - DNA, 19 bp, Artificial Sequence
  Synthetic Polynucleotide
gcgaattcatctaggtcag

SEQ ID NO: 7454 - DNA, 17 bp, Artificial Sequence
  Synthetic Polynucleotide
ccctggtctcgtttcac

SEQ ID NO: 7455 - DNA, 18 bp, Artificial Sequence
  Synthetic Polynucleotide
cgttcttaatgcgtagta

SEQ ID NO: 7456 - DNA, 18 bp, Artificial Sequence
  Synthetic Polynucleotide
ggggtctttctgtctctg

SEQ ID NO: 7457 - DNA, 17 bp, Artificial Sequence
  Synthetic Polynucleotide
tcagtaagtctgctcga

SEQ ID NO: 7458 - DNA, 20 bp, Artificial Sequence
  Synthetic Polynucleotide
gcatacacaaagttgattca

SEQ ID NO: 7459 - DNA, 18 bp, Artificial Sequence
  Synthetic Polynucleotide
tgctggtaagttgaagca

SEQ ID NO: 7460 - DNA, 17 bp, Artificial Sequence
  Synthetic Polynucleotide
attggcatgatggagct

SEQ ID NO: 7461 - DNA, 18 bp, Artificial Sequence
  Synthetic Polynucleotide
gtacaagtagctgtggtt

SEQ ID NO: 7462 - DNA, 20 bp, Artificial Sequence
  Synthetic Polynucleotide
cgctctcacaattatttctg

SEQ ID NO: 7463 - DNA, 20 bp, Artificial Sequence
  Synthetic Polynucleotide
gaggaacatttcactgaagc

SEQ ID NO: 7464 - DNA, 18 bp, Artificial Sequence
  Synthetic Polynucleotide
acctggagtctaagtacg

SEQ ID NO: 7465 - DNA, 17 bp, Artificial Sequence
  Synthetic Polynucleotide
gtgcatagagtggctgc

SEQ ID NO: 7466 - DNA, 20 bp, Artificial Sequence
  Synthetic Polynucleotide
aattttaattaccgactgcc

SEQ ID NO: 7467 - DNA, 20 bp, Artificial Sequence
  Synthetic Polynucleotide
gacgtataccataacacttc

SEQ ID NO: 7468 - DNA, 20 bp, Artificial Sequence
  Synthetic Polynucleotide
atattgctgaagtgtgtatg

SEQ ID NO: 7469 - DNA, 17 bp, Artificial Sequence
  Synthetic Polynucleotide
ttcaagtgcgaccgaca

SEQ ID NO: 7470 - DNA, 17 bp, Artificial Sequence
  Synthetic Polynucleotide
tcattaaggtagaggcg

SEQ ID NO: 7471 - DNA, 19 bp, Artificial Sequence
  Synthetic Polynucleotide
tactttcattttcaccgtt

SEQ ID NO: 7472 - DNA, 20 bp, Artificial Sequence
  Synthetic Polynucleotide
agagggaattgaagtaacaa

SEQ ID NO: 7473 - DNA, 19 bp, Artificial Sequence
  Synthetic Polynucleotide
actgtcatcaagctcgtct

SEQ ID NO: 7474 - DNA, 17 bp, Artificial Sequence
  Synthetic Polynucleotide
acccaaacttaccgaaa

SEQ ID NO: 7475 - DNA, 19 bp, Artificial Sequence
  Synthetic Polynucleotide
ctcgctcccgataaccaat

SEQ ID NO: 7476 - DNA, 18 bp, Artificial Sequence
  Synthetic Polynucleotide
acgaaactgctcctttga

SEQ ID NO: 7477 - DNA, 19 bp, Artificial Sequence
  Synthetic Polynucleotide
agagggtggttgacatccc

SEQ ID NO: 7478 - DNA, 20 bp, Artificial Sequence
  Synthetic Polynucleotide
aagaccaacatggatgtact

SEQ ID NO: 7479 - DNA, 20 bp, Artificial Sequence
  Synthetic Polynucleotide
ctgataacacagtagtgacc

SEQ ID NO: 7480 - DNA, 19 bp, Artificial Sequence
  Synthetic Polynucleotide
agctttaccagacaatgag

SEQ ID NO: 7481 - DNA, 19 bp, Artificial Sequence
  Synthetic Polynucleotide
ggatctccgtcaaagtgat

SEQ ID NO: 7482 - DNA, 18 bp, Artificial Sequence
  Synthetic Polynucleotide
cgatgccctgtaatcgcg

SEQ ID NO: 7483 - DNA, 17 bp, Artificial Sequence
  Synthetic Polynucleotide
ctgtggcttctcagtca

SEQ ID NO: 7484 - DNA, 18 bp, Artificial Sequence
  Synthetic Polynucleotide
aaacatcaaaacgctaga

SEQ ID NO: 7485 - DNA, 20 bp, Artificial Sequence
  Synthetic Polynucleotide
tatgggttctctcgtattta

SEQ ID NO: 7486 - DNA, 18 bp, Artificial Sequence
  Synthetic Polynucleotide
ggtcccttaaagtacgaa

SEQ ID NO: 7487 - DNA, 20 bp, Artificial Sequence
  Synthetic Polynucleotide
ctcttatctgcttcattacc

SEQ ID NO: 7488 - DNA, 18 bp, Artificial Sequence
  Synthetic Polynucleotide
aagcacatagtgactacg

SEQ ID NO: 7489 - DNA, 19 bp, Artificial Sequence
  Synthetic Polynucleotide
acagagtcattctcaaaca

SEQ ID NO: 7490 - DNA, 17 bp, Artificial Sequence
  Synthetic Polynucleotide
ggtgaccccttctaacg

SEQ ID NO: 7491 - DNA, 17 bp, Artificial Sequence
  Synthetic Polynucleotide
aggagctgaccacacta

SEQ ID NO: 7492 - DNA, 17 bp, Artificial Sequence
  Synthetic Polynucleotide
gcaaaatgtgccaatta

SEQ ID NO: 7493 - DNA, 18 bp, Artificial Sequence
  Synthetic Polynucleotide
ggacgttactcaatgtgt

SEQ ID NO: 7494 - DNA, 18 bp, Artificial Sequence
  Synthetic Polynucleotide
gtgtcctccgtgatgggt

SEQ ID NO: 7495 - DNA, 18 bp, Artificial Sequence
  Synthetic Polynucleotide
ggttaaacgggattaagg

SEQ ID NO: 7496 - DNA, 20 bp, Artificial Sequence
  Synthetic Polynucleotide
taaaagttctgttccgagag

SEQ ID NO: 7497 - DNA, 19 bp, Artificial Sequence
  Synthetic Polynucleotide
ggcttaagggattagggca

SEQ ID NO: 7498 - DNA, 17 bp, Artificial Sequence
  Synthetic Polynucleotide
cagcaagagctacaagc

SEQ ID NO: 7499 - DNA, 20 bp, Artificial Sequence
  Synthetic Polynucleotide
gtgtcacactacgcatgtca

SEQ ID NO: 7500 - DNA, 19 bp, Artificial Sequence
  Synthetic Polynucleotide
gatgcaagatggatggtgt

SEQ ID NO: 7501 - DNA, 20 bp, Artificial Sequence
  Synthetic Polynucleotide
cttatcatacgcctcgcatg

SEQ ID NO: 7502 - DNA, 20 bp, Artificial Sequence
  Synthetic Polynucleotide
acgatgtcttcttctttcac

SEQ ID NO: 7503 - DNA, 18 bp, Artificial Sequence
  Synthetic Polynucleotide
ctagtgaacccacttcca

SEQ ID NO: 7504 - DNA, 20 bp, Artificial Sequence
  Synthetic Polynucleotide
gagcagacgtaataataaga

SEQ ID NO: 7505 - DNA, 20 bp, Artificial Sequence
  Synthetic Polynucleotide
cagatagagacggcattata

SEQ ID NO: 7506 - DNA, 19 bp, Artificial Sequence
  Synthetic Polynucleotide
cgaaagtatgctactgaac

SEQ ID NO: 7507 - DNA, 20 bp, Artificial Sequence
  Synthetic Polynucleotide
gtatctgtgtaagtttacgc

SEQ ID NO: 7508 - DNA, 20 bp, Artificial Sequence
  Synthetic Polynucleotide
gggtccatttcaagtgttaa

SEQ ID NO: 7509 - DNA, 17 bp, Artificial Sequence
  Synthetic Polynucleotide
ctctttctgtcgccaat

SEQ ID NO: 7510 - DNA, 19 bp, Artificial Sequence
  Synthetic Polynucleotide
cgagtatcaacaatgacac

SEQ ID NO: 7511 - DNA, 17 bp, Artificial Sequence
  Synthetic Polynucleotide
actgacgcttaccaacc

SEQ ID NO: 7512 - DNA, 20 bp, Artificial Sequence
  Synthetic Polynucleotide
atgtatggtatcaaactacg

SEQ ID NO: 7513 - DNA, 18 bp, Artificial Sequence
  Synthetic Polynucleotide
agagaacaagctacgacc

SEQ ID NO: 7514 - DNA, 20 bp, Artificial Sequence
  Synthetic Polynucleotide
gatatcaattagctagaccg

SEQ ID NO: 7515 - DNA, 20 bp, Artificial Sequence
  Synthetic Polynucleotide
actcaactcaatatgcaaca

SEQ ID NO: 7516 - DNA, 18 bp, Artificial Sequence
  Synthetic Polynucleotide
gtgatccaatcgcctaaa

SEQ ID NO: 7517 - DNA, 17 bp, Artificial Sequence
  Synthetic Polynucleotide
gtatccgctttcctcga

SEQ ID NO: 7518 - DNA, 19 bp, Artificial Sequence
  Synthetic Polynucleotide
agagattccaaatagacgc

SEQ ID NO: 7519 - DNA, 20 bp, Artificial Sequence
  Synthetic Polynucleotide
ttaccgccttcattaatagt

SEQ ID NO: 7520 - DNA, 19 bp, Artificial Sequence
  Synthetic Polynucleotide
acgcaatagtatctgagac

SEQ ID NO: 7521 - DNA, 18 bp, Artificial Sequence
  Synthetic Polynucleotide
tctatctctttcgccata

SEQ ID NO: 7522 - DNA, 20 bp, Artificial Sequence
  Synthetic Polynucleotide
cctcaaataccttttgtctc

SEQ ID NO: 7523 - DNA, 20 bp, Artificial Sequence
  Synthetic Polynucleotide
ttgatcacttccaaaacatc

SEQ ID NO: 7524 - DNA, 20 bp, Artificial Sequence
  Synthetic Polynucleotide
tgatcatttctttgctgata

SEQ ID NO: 7525 - DNA, 19 bp, Artificial Sequence
  Synthetic Polynucleotide
attctcccaaaggagcaat

SEQ ID NO: 7526 - DNA, 20 bp, Artificial Sequence
  Synthetic Polynucleotide
tggtggaatagtcatagatt

SEQ ID NO: 7527 - DNA, 18 bp, Artificial Sequence
  Synthetic Polynucleotide
ccaggttgacgcagatga

SEQ ID NO: 7528 - DNA, 19 bp, Artificial Sequence
  Synthetic Polynucleotide
tacttccaacttgacgatc

SEQ ID NO: 7529 - DNA, 18 bp, Artificial Sequence
  Synthetic Polynucleotide
taattctattcgctggcc

SEQ ID NO: 7530 - DNA, 19 bp, Artificial Sequence
  Synthetic Polynucleotide
tggggcattcaatggagga

SEQ ID NO: 7531 - DNA, 19 bp, Artificial Sequence
  Synthetic Polynucleotide
aggtcgctaatcatacatt

SEQ ID NO: 7532 - DNA, 20 bp, Artificial Sequence
  Synthetic Polynucleotide
tatgaaaacacaatcaactg

SEQ ID NO: 7533 - DNA, 18 bp, Artificial Sequence
  Synthetic Polynucleotide
acgtatctcttgcactac

SEQ ID NO: 7534 - DNA, 18 bp, Artificial Sequence
  Synthetic Polynucleotide
ctggaacgctagaaacgt

SEQ ID NO: 7535 - DNA, 18 bp, Artificial Sequence
  Synthetic Polynucleotide
gtttgaagcagaatcaga

SEQ ID NO: 7536 - DNA, 20 bp, Artificial Sequence
  Synthetic Polynucleotide
tctggaaaatctattggtag

SEQ ID NO: 7537 - DNA, 19 bp, Artificial Sequence
  Synthetic Polynucleotide
cacatgcaacatcgccatc

SEQ ID NO: 7538 - DNA, 18 bp, Artificial Sequence
  Synthetic Polynucleotide
tcgcaatcttcggatgta

SEQ ID NO: 7539 - DNA, 20 bp, Artificial Sequence
  Synthetic Polynucleotide
cgcattcatatcaatgacgc

SEQ ID NO: 7540 - DNA, 18 bp, Artificial Sequence
  Synthetic Polynucleotide
gacacttcgcactctctc

SEQ ID NO: 7541 - DNA, 19 bp, Artificial Sequence
  Synthetic Polynucleotide
gcggtatattgtttggtag

SEQ ID NO: 7542 - DNA, 20 bp, Artificial Sequence
  Synthetic Polynucleotide
acccagtatccatcattaca

SEQ ID NO: 7543 - DNA, 20 bp, Artificial Sequence
  Synthetic Polynucleotide
cggtatcgacataacaggtc

SEQ ID NO: 7544 - DNA, 19 bp, Artificial Sequence
  Synthetic Polynucleotide
gaaataacacggtacgcag

SEQ ID NO: 7545 - DNA, 20 bp, Artificial Sequence
  Synthetic Polynucleotide
ctggaggtagtagtaatcta

SEQ ID NO: 7546 - DNA, 20 bp, Artificial Sequence
  Synthetic Polynucleotide
ttatttgtagccaaggatga

SEQ ID NO: 7547 - DNA, 18 bp, Artificial Sequence
  Synthetic Polynucleotide
ggggtaacacattcagga

SEQ ID NO: 7548 - DNA, 20 bp, Artificial Sequence
  Synthetic Polynucleotide
cttttgagtcatcatgttta

SEQ ID NO: 7549 - DNA, 19 bp, Artificial Sequence
  Synthetic Polynucleotide
acaatcacacaacacttgg

SEQ ID NO: 7550 - DNA, 20 bp, Artificial Sequence
  Synthetic Polynucleotide
tggttcgctacttacactat

SEQ ID NO: 7551 - DNA, 19 bp, Artificial Sequence
  Synthetic Polynucleotide
actccttcaggtttatgat

SEQ ID NO: 7552 - DNA, 19 bp, Artificial Sequence
  Synthetic Polynucleotide
tccgaagagatgactaata

SEQ ID NO: 7553 - DNA, 20 bp, Artificial Sequence
  Synthetic Polynucleotide
tacacgagaccgaaagtacc

SEQ ID NO: 7554 - DNA, 18 bp, Artificial Sequence
  Synthetic Polynucleotide
gtcaatccgacaactgcc

SEQ ID NO: 7555 - DNA, 20 bp, Artificial Sequence
  Synthetic Polynucleotide
tactaacaacaggtcaatgc

SEQ ID NO: 7556 - DNA, 20 bp, Artificial Sequence
  Synthetic Polynucleotide
gctacatttagggacaagaa

SEQ ID NO: 7557 - DNA, 20 bp, Artificial Sequence
  Synthetic Polynucleotide
ccaatcagattttgcaggag

SEQ ID NO: 7558 - DNA, 18 bp, Artificial Sequence
  Synthetic Polynucleotide
tattgcgtctccacctaa

SEQ ID NO: 7559 - DNA, 20 bp, Artificial Sequence
  Synthetic Polynucleotide
ataattctaccatttgtgca

SEQ ID NO: 7560 - DNA, 18 bp, Artificial Sequence
  Synthetic Polynucleotide
agtcagaacgtccgaaaa

SEQ ID NO: 7561 - DNA, 19 bp, Artificial Sequence
  Synthetic Polynucleotide
tccataatcaatgaggatg

SEQ ID NO: 7562 - DNA, 17 bp, Artificial Sequence
  Synthetic Polynucleotide
gcaggaaaaggaagtga

SEQ ID NO: 7563 - DNA, 20 bp, Artificial Sequence
  Synthetic Polynucleotide
actcaccttacaattacgta

SEQ ID NO: 7564 - DNA, 19 bp, Artificial Sequence
  Synthetic Polynucleotide
ttaccatcatatcagccac

SEQ ID NO: 7565 - DNA, 20 bp, Artificial Sequence
  Synthetic Polynucleotide
ggtgctgccatagccaaatt

SEQ ID NO: 7566 - DNA, 19 bp, Artificial Sequence
  Synthetic Polynucleotide
atcccactgtgctcacgaa

SEQ ID NO: 7567 - DNA, 17 bp, Artificial Sequence
  Synthetic Polynucleotide
atgtgaacatcagcgag

SEQ ID NO: 7568 - DNA, 20 bp, Artificial Sequence
  Synthetic Polynucleotide
aggatcaatgagttcaccat

SEQ ID NO: 7569 - DNA, 20 bp, Artificial Sequence
  Synthetic Polynucleotide
cctcccagtatcgccttaga

SEQ ID NO: 7570 - DNA, 19 bp, Artificial Sequence
  Synthetic Polynucleotide
ggaggaagaatcaatgccg

SEQ ID NO: 7571 - DNA, 20 bp, Artificial Sequence
  Synthetic Polynucleotide
gtaaaggaacgtcgaatgaa

SEQ ID NO: 7572 - DNA, 20 bp, Artificial Sequence
  Synthetic Polynucleotide
ccagtaaaagaaatacccag

SEQ ID NO: 7573 - DNA, 19 bp, Artificial Sequence
  Synthetic Polynucleotide
ccaaggttactaccaaggg

SEQ ID NO: 7574 - DNA, 18 bp, Artificial Sequence
  Synthetic Polynucleotide
tctgaattgaatcatcga

SEQ ID NO: 7575 - DNA, 18 bp, Artificial Sequence
  Synthetic Polynucleotide
aacaagcgaaagcccaac

SEQ ID NO: 7576 - DNA, 19 bp, Artificial Sequence
  Synthetic Polynucleotide
tactctagaccaatttcag

SEQ ID NO: 7577 - DNA, 18 bp, Artificial Sequence
  Synthetic Polynucleotide
tatttccacccaagtgca

SEQ ID NO: 7578 - DNA, 17 bp, Artificial Sequence
  Synthetic Polynucleotide
ccaacagaatacacgcc

SEQ ID NO: 7579 - DNA, 19 bp, Artificial Sequence
  Synthetic Polynucleotide
atgctctctccaagccatt

SEQ ID NO: 7580 - DNA, 20 bp, Artificial Sequence
  Synthetic Polynucleotide
cacattaaggattccaaact

SEQ ID NO: 7581 - DNA, 20 bp, Artificial Sequence
  Synthetic Polynucleotide
tatgagtcgtacactacccc

SEQ ID NO: 7582 - DNA, 17 bp, Artificial Sequence
  Synthetic Polynucleotide
agtgttcagtggacttg

SEQ ID NO: 7583 - DNA, 17 bp, Artificial Sequence
  Synthetic Polynucleotide
gtgtggagagtaagggt

SEQ ID NO: 7584 - DNA, 20 bp, Artificial Sequence
  Synthetic Polynucleotide
ttagaagacatcggagcagg

SEQ ID NO: 7585 - DNA, 20 bp, Artificial Sequence
  Synthetic Polynucleotide
tcccaaatgccataccaatc

SEQ ID NO: 7586 - DNA, 20 bp, Artificial Sequence
  Synthetic Polynucleotide
tatacaatacctcagaatcg

SEQ ID NO: 7587 - DNA, 17 bp, Artificial Sequence
  Synthetic Polynucleotide
gtgctggagttgttcat

SEQ ID NO: 7588 - DNA, 19 bp, Artificial Sequence
  Synthetic Polynucleotide
tcaagagctataccaacca

SEQ ID NO: 7589 - DNA, 18 bp, Artificial Sequence
  Synthetic Polynucleotide
gtcggtcctatttcaacg

SEQ ID NO: 7590 - DNA, 19 bp, Artificial Sequence
  Synthetic Polynucleotide
gattgagttctctaaacga

SEQ ID NO: 7591 - DNA, 17 bp, Artificial Sequence
  Synthetic Polynucleotide
tcattcaaacacgcacg

SEQ ID NO: 7592 - DNA, 19 bp, Artificial Sequence
  Synthetic Polynucleotide
aagaaggtctcctccctgt

SEQ ID NO: 7593 - DNA, 20 bp, Artificial Sequence
  Synthetic Polynucleotide
tcgctgtatttgtggtaata

SEQ ID NO: 7594 - DNA, 20 bp, Artificial Sequence
  Synthetic Polynucleotide
tattgcatcaccttttgtta

SEQ ID NO: 7595 - DNA, 18 bp, Artificial Sequence
  Synthetic Polynucleotide
ttcctcgccaaaacaatc

SEQ ID NO: 7596 - DNA, 20 bp, Artificial Sequence
  Synthetic Polynucleotide
gaaaagtcagttacaggcaa

SEQ ID NO: 7597 - DNA, 19 bp, Artificial Sequence
  Synthetic Polynucleotide
ccaattcaacacgagatct

SEQ ID NO: 7598 - DNA, 17 bp, Artificial Sequence
  Synthetic Polynucleotide
ggaacgcttatggtttg

SEQ ID NO: 7599 - DNA, 17 bp, Artificial Sequence
  Synthetic Polynucleotide
ggacactatcgctgcaa

SEQ ID NO: 7600 - DNA, 17 bp, Artificial Sequence
  Synthetic Polynucleotide
gcgccatcgcaaagttt

SEQ ID NO: 7601 - DNA, 18 bp, Artificial Sequence
  Synthetic Polynucleotide
ccttagaaagtttggagc

SEQ ID NO: 7602 - DNA, 17 bp, Artificial Sequence
  Synthetic Polynucleotide
cgaacctcaagttacgt

SEQ ID NO: 7603 - DNA, 19 bp, Artificial Sequence
  Synthetic Polynucleotide
aagtttctgtactagctgg

SEQ ID NO: 7604 - DNA, 17 bp, Artificial Sequence
  Synthetic Polynucleotide
gcgccattctcttcatt

SEQ ID NO: 7605 - DNA, 20 bp, Artificial Sequence
  Synthetic Polynucleotide
agtcttatctttgatcgctt

SEQ ID NO: 7606 - DNA, 20 bp, Artificial Sequence
  Synthetic Polynucleotide
ggtatactattcgcaagctg

SEQ ID NO: 7607 - DNA, 20 bp, Artificial Sequence
  Synthetic Polynucleotide
ttgtgtcggattatgcacat

SEQ ID NO: 7608 - DNA, 18 bp, Artificial Sequence
  Synthetic Polynucleotide
tcagccttatggtttctt

SEQ ID NO: 7609 - DNA, 17 bp, Artificial Sequence
  Synthetic Polynucleotide
cgtcggacataccaatg

SEQ ID NO: 7610 - DNA, 18 bp, Artificial Sequence
  Synthetic Polynucleotide
gatacccaacatcagtcg

SEQ ID NO: 7611 - DNA, 18 bp, Artificial Sequence
  Synthetic Polynucleotide
taccatcgggtctgattc

SEQ ID NO: 7612 - DNA, 19 bp, Artificial Sequence
  Synthetic Polynucleotide
tggaattttcatccaacga

SEQ ID NO: 7613 - DNA, 18 bp, Artificial Sequence
  Synthetic Polynucleotide
atgaaatgccccagtgcc

SEQ ID NO: 7614 - DNA, 20 bp, Artificial Sequence
  Synthetic Polynucleotide
atcattgaccactgagctat

SEQ ID NO: 7615 - DNA, 20 bp, Artificial Sequence
  Synthetic Polynucleotide
tgctaagattgtaaacacgg

SEQ ID NO: 7616 - DNA, 18 bp, Artificial Sequence
  Synthetic Polynucleotide
tctcatcctggactacat

SEQ ID NO: 7617 - DNA, 20 bp, Artificial Sequence
  Synthetic Polynucleotide
tctagcgttctcacattctt

SEQ ID NO: 7618 - DNA, 17 bp, Artificial Sequence
  Synthetic Polynucleotide
tattgcatctgtcctga

SEQ ID NO: 7619 - DNA, 19 bp, Artificial Sequence
  Synthetic Polynucleotide
cgctttgtcactcacttcg

SEQ ID NO: 7620 - DNA, 17 bp, Artificial Sequence
  Synthetic Polynucleotide
ttcacatgattccgcaa

SEQ ID NO: 7621 - DNA, 20 bp, Artificial Sequence
  Synthetic Polynucleotide
tttccgtcactatacaaaag

SEQ ID NO: 7622 - DNA, 18 bp, Artificial Sequence
  Synthetic Polynucleotide
tttattgctctcgacagg

SEQ ID NO: 7623 - DNA, 17 bp, Artificial Sequence
  Synthetic Polynucleotide
ctccggtttctgccagt

SEQ ID NO: 7624 - DNA, 17 bp, Artificial Sequence
  Synthetic Polynucleotide
tcgaactctccgcctcc

SEQ ID NO: 7625 - DNA, 20 bp, Artificial Sequence
  Synthetic Polynucleotide
ttctttgatcttttgcttca

SEQ ID NO: 7626 - DNA, 20 bp, Artificial Sequence
  Synthetic Polynucleotide
gagctgaaggattttgtcag

SEQ ID NO: 7627 - DNA, 19 bp, Artificial Sequence
  Synthetic Polynucleotide
tagtcgccatccacatatc

SEQ ID NO: 7628 - DNA, 19 bp, Artificial Sequence
  Synthetic Polynucleotide
ggctaactattcactacca

SEQ ID NO: 7629 - DNA, 19 bp, Artificial Sequence
  Synthetic Polynucleotide
gggtcctgtaactatcaga

SEQ ID NO: 7630 - DNA, 17 bp, Artificial Sequence
  Synthetic Polynucleotide
ccccagatagttcacta

SEQ ID NO: 7631 - DNA, 18 bp, Artificial Sequence
  Synthetic Polynucleotide
catcgttccacttaagca

SEQ ID NO: 7632 - DNA, 18 bp, Artificial Sequence
  Synthetic Polynucleotide
tcgaacaattaccccaca

SEQ ID NO: 7633 - DNA, 19 bp, Artificial Sequence
  Synthetic Polynucleotide
tcggtctgttcttaatgaa

SEQ ID NO: 7634 - DNA, 18 bp, Artificial Sequence
  Synthetic Polynucleotide
cagccgttcctcttatgc

SEQ ID NO: 7635 - DNA, 17 bp, Artificial Sequence
  Synthetic Polynucleotide
tatctgcatgattcgca

SEQ ID NO: 7636 - DNA, 17 bp, Artificial Sequence
  Synthetic Polynucleotide
actgccactgctgaagg

SEQ ID NO: 7637 - DNA, 17 bp, Artificial Sequence
  Synthetic Polynucleotide
cacctacaccacagtcc

SEQ ID NO: 7638 - DNA, 19 bp, Artificial Sequence
  Synthetic Polynucleotide
gcacaccaattatcaccat

SEQ ID NO: 7639 - DNA, 20 bp, Artificial Sequence
  Synthetic Polynucleotide
tagtattcatacgttcacaa

SEQ ID NO: 7640 - DNA, 18 bp, Artificial Sequence
  Synthetic Polynucleotide
gaacctgcttgactagat

SEQ ID NO: 7641 - DNA, 20 bp, Artificial Sequence
  Synthetic Polynucleotide
agattcctacctcctcccaa

SEQ ID NO: 7642 - DNA, 20 bp, Artificial Sequence
  Synthetic Polynucleotide
tattgtgagatgatgggtat

SEQ ID NO: 7643 - DNA, 17 bp, Artificial Sequence
  Synthetic Polynucleotide
gctttataccgcagaac

SEQ ID NO: 7644 - DNA, 18 bp, Artificial Sequence
  Synthetic Polynucleotide
cgggatattattggcact

SEQ ID NO: 7645 - DNA, 19 bp, Artificial Sequence
  Synthetic Polynucleotide
atgaagcatattcagttga

SEQ ID NO: 7646 - DNA, 19 bp, Artificial Sequence
  Synthetic Polynucleotide
gagatgatggatcgccagt

SEQ ID NO: 7647 - DNA, 17 bp, Artificial Sequence
  Synthetic Polynucleotide
accaggccgtacttgtc

SEQ ID NO: 7648 - DNA, 18 bp, Artificial Sequence
  Synthetic Polynucleotide
gagttcgacgccgttagt

SEQ ID NO: 7649 - DNA, 17 bp, Artificial Sequence
  Synthetic Polynucleotide
tctgagatgagaatcga

SEQ ID NO: 7650 - DNA, 17 bp, Artificial Sequence
  Synthetic Polynucleotide
atgtcagctatgtgtga

SEQ ID NO: 7651 - DNA, 17 bp, Artificial Sequence
  Synthetic Polynucleotide
gttagcttggtcctcat

SEQ ID NO: 7652 - DNA, 19 bp, Artificial Sequence
  Synthetic Polynucleotide
gaagtcttcaacatggatg

SEQ ID NO: 7653 - DNA, 19 bp, Artificial Sequence
  Synthetic Polynucleotide
ctgcatttgtatccaggcc

SEQ ID NO: 7654 - DNA, 20 bp, Artificial Sequence
  Synthetic Polynucleotide
acagacgttccactatgccg

SEQ ID NO: 7655 - DNA, 19 bp, Artificial Sequence
  Synthetic Polynucleotide
ccacgcttaaccactcctg

SEQ ID NO: 7656 - DNA, 17 bp, Artificial Sequence
  Synthetic Polynucleotide
accaaagccgagatggc

SEQ ID NO: 7657 - DNA, 17 bp, Artificial Sequence
  Synthetic Polynucleotide
gtagcagcatgagtacc

SEQ ID NO: 7658 - DNA, 17 bp, Artificial Sequence
  Synthetic Polynucleotide
ttccaggaaaacgacaa

SEQ ID NO: 7659 - DNA, 17 bp, Artificial Sequence
  Synthetic Polynucleotide
ctctagcacccgttggg

SEQ ID NO: 7660 - DNA, 19 bp, Artificial Sequence
  Synthetic Polynucleotide
tgtgggatttcttcattct

SEQ ID NO: 7661 - DNA, 17 bp, Artificial Sequence
  Synthetic Polynucleotide
tcccagaaaagtttcca

SEQ ID NO: 7662 - DNA, 17 bp, Artificial Sequence
  Synthetic Polynucleotide
gacattttgtgtcacga

SEQ ID NO: 7663 - DNA, 17 bp, Artificial Sequence
  Synthetic Polynucleotide
cgcccctatggtttccc

SEQ ID NO: 7664 - DNA, 18 bp, Artificial Sequence
  Synthetic Polynucleotide
acataactgtcctgtgtg

SEQ ID NO: 7665 - DNA, 18 bp, Artificial Sequence
  Synthetic Polynucleotide
tactccttagtctcaacc

SEQ ID NO: 7666 - DNA, 19 bp, Artificial Sequence
  Synthetic Polynucleotide
tgttgttcaggaaaacgac

SEQ ID NO: 7667 - DNA, 18 bp, Artificial Sequence
  Synthetic Polynucleotide
tagtatcagcagcatgta

SEQ ID NO: 7668 - DNA, 20 bp, Artificial Sequence
  Synthetic Polynucleotide
tagctatgataacctcaaca

SEQ ID NO: 7669 - DNA, 18 bp, Artificial Sequence
  Synthetic Polynucleotide
ccagtcttgagattgcaa

SEQ ID NO: 7670 - DNA, 18 bp, Artificial Sequence
  Synthetic Polynucleotide
tctactagcctccttagg

SEQ ID NO: 7671 - DNA, 17 bp, Artificial Sequence
  Synthetic Polynucleotide
gtgtatggcgtggtgca

SEQ ID NO: 7672 - DNA, 18 bp, Artificial Sequence
  Synthetic Polynucleotide
tggaccaatgtgatcatg

SEQ ID NO: 7673 - DNA, 19 bp, Artificial Sequence
  Synthetic Polynucleotide
acaactcaacaccttgtcc

SEQ ID NO: 7674 - DNA, 18 bp, Artificial Sequence
  Synthetic Polynucleotide
cgtaccaaagagaaaacc

SEQ ID NO: 7675 - DNA, 19 bp, Artificial Sequence
  Synthetic Polynucleotide
cgattcaatatcaacggtt

SEQ ID NO: 7676 - DNA, 19 bp, Artificial Sequence
  Synthetic Polynucleotide
taagcatatgggattgaaa

SEQ ID NO: 7677 - DNA, 20 bp, Artificial Sequence
  Synthetic Polynucleotide
agatatgtaaattcccgtcg

SEQ ID NO: 7678 - DNA, 18 bp, Artificial Sequence
  Synthetic Polynucleotide
ggatagatactgcgaaca

SEQ ID NO: 7679 - DNA, 17 bp, Artificial Sequence
  Synthetic Polynucleotide
tctagtacgttaggccc

SEQ ID NO: 7680 - DNA, 18 bp, Artificial Sequence
  Synthetic Polynucleotide
aaccttacgtatatcgcg

SEQ ID NO: 7681 - DNA, 20 bp, Artificial Sequence
  Synthetic Polynucleotide
cgttagtctcgattgcctgc

SEQ ID NO: 7682 - DNA, 20 bp, Artificial Sequence
  Synthetic Polynucleotide
actcatgttctaattccccg

SEQ ID NO: 7683 - DNA, 18 bp, Artificial Sequence
  Synthetic Polynucleotide
tattccatccacatctgt

SEQ ID NO: 7684 - DNA, 20 bp, Artificial Sequence
  Synthetic Polynucleotide
ttcagaactgtaaagatcga

SEQ ID NO: 7685 - DNA, 18 bp, Artificial Sequence
  Synthetic Polynucleotide
aagaatggacgaaatgac

SEQ ID NO: 7686 - DNA, 18 bp, Artificial Sequence
  Synthetic Polynucleotide
gctaaaacctcaaacagc

SEQ ID NO: 7687 - DNA, 17 bp, Artificial Sequence
  Synthetic Polynucleotide
ccgaagaccctaagcac

SEQ ID NO: 7688 - DNA, 18 bp, Artificial Sequence
  Synthetic Polynucleotide
ggaccctcttatttagca

SEQ ID NO: 7689 - DNA, 19 bp, Artificial Sequence
  Synthetic Polynucleotide
actcaattctcgttcctgg

SEQ ID NO: 7690 - DNA, 18 bp, Artificial Sequence
  Synthetic Polynucleotide
tacaagaaccatcaacta

SEQ ID NO: 7691 - DNA, 19 bp, Artificial Sequence
  Synthetic Polynucleotide
ctgcatacaattcaggatc

SEQ ID NO: 7692 - DNA, 17 bp, Artificial Sequence
  Synthetic Polynucleotide
atcttgactgcatgaca

SEQ ID NO: 7693 - DNA, 20 bp, Artificial Sequence
  Synthetic Polynucleotide
tcttgaccatccttaactgc

SEQ ID NO: 7694 - DNA, 19 bp, Artificial Sequence
  Synthetic Polynucleotide
aaaacagagtagctcttga

SEQ ID NO: 7695 - DNA, 19 bp, Artificial Sequence
  Synthetic Polynucleotide
gtatgttatttgaagggca

SEQ ID NO: 7696 - DNA, 19 bp, Artificial Sequence
  Synthetic Polynucleotide
aacaaactgactctcgaag

SEQ ID NO: 7697 - DNA, 18 bp, Artificial Sequence
  Synthetic Polynucleotide
ccgaaatagctcaatgta

SEQ ID NO: 7698 - DNA, 18 bp, Artificial Sequence
  Synthetic Polynucleotide
atatgatatggcggctac

SEQ ID NO: 7699 - DNA, 19 bp, Artificial Sequence
  Synthetic Polynucleotide
atctttcaacgattcctca

SEQ ID NO: 7700 - DNA, 20 bp, Artificial Sequence
  Synthetic Polynucleotide
ggatgaagctccagtgtatt

SEQ ID NO: 7701 - DNA, 18 bp, Artificial Sequence
  Synthetic Polynucleotide
acctgatccagtgagatg

SEQ ID NO: 7702 - DNA, 19 bp, Artificial Sequence
  Synthetic Polynucleotide
tgaggcacttcaacatatg

SEQ ID NO: 7703 - DNA, 18 bp, Artificial Sequence
  Synthetic Polynucleotide
ggtaccccttgagatcct

SEQ ID NO: 7704 - DNA, 19 bp, Artificial Sequence
  Synthetic Polynucleotide
acatgaaaagtcagcacaa

SEQ ID NO: 7705 - DNA, 19 bp, Artificial Sequence
  Synthetic Polynucleotide
ccttggtagacatatcctc

SEQ ID NO: 7706 - DNA, 20 bp, Artificial Sequence
  Synthetic Polynucleotide
acagtcaagagaatcattga

SEQ ID NO: 7707 - DNA, 18 bp, Artificial Sequence
  Synthetic Polynucleotide
aacacagtacacttctga

SEQ ID NO: 7708 - DNA, 19 bp, Artificial Sequence
  Synthetic Polynucleotide
gagacagtcctcctttcca

SEQ ID NO: 7709 - DNA, 17 bp, Artificial Sequence
  Synthetic Polynucleotide
gcatcctgctcatcatg

SEQ ID NO: 7710 - DNA, 17 bp, Artificial Sequence
  Synthetic Polynucleotide
atgtggacaagatggcc

SEQ ID NO: 7711 - DNA, 19 bp, Artificial Sequence
  Synthetic Polynucleotide
ggttcagatcatcctgcat

SEQ ID NO: 7712 - DNA, 17 bp, Artificial Sequence
  Synthetic Polynucleotide
aaactaacacccctcct

SEQ ID NO: 7713 - DNA, 18 bp, Artificial Sequence
  Synthetic Polynucleotide
gggtcatcataaacctcc

SEQ ID NO: 7714 - DNA, 19 bp, Artificial Sequence
  Synthetic Polynucleotide
ctgatgctcattacaagtc

SEQ ID NO: 7715 - DNA, 19 bp, Artificial Sequence
  Synthetic Polynucleotide
aaattaccccagaaatcag

SEQ ID NO: 7716 - DNA, 20 bp, Artificial Sequence
  Synthetic Polynucleotide
agttgagagagatatcatgg

SEQ ID NO: 7717 - DNA, 18 bp, Artificial Sequence
  Synthetic Polynucleotide
ggagaattatcgtggacc

SEQ ID NO: 7718 - DNA, 17 bp, Artificial Sequence
  Synthetic Polynucleotide
acctggtacggagagtg

SEQ ID NO: 7719 - DNA, 20 bp, Artificial Sequence
  Synthetic Polynucleotide
caagtcctttgcttatgtta

SEQ ID NO: 7720 - DNA, 17 bp, Artificial Sequence
  Synthetic Polynucleotide
atcgagccaaagacgga

SEQ ID NO: 7721 - DNA, 20 bp, Artificial Sequence
  Synthetic Polynucleotide
cattgtaccctgaatcgtga

SEQ ID NO: 7722 - DNA, 18 bp, Artificial Sequence
  Synthetic Polynucleotide
ggccctaattcccaagtc

SEQ ID NO: 7723 - DNA, 17 bp, Artificial Sequence
  Synthetic Polynucleotide
caacacttccctcagcc

SEQ ID NO: 7724 - DNA, 18 bp, Artificial Sequence
  Synthetic Polynucleotide
gaacttcacacccgagcc

SEQ ID NO: 7725 - DNA, 17 bp, Artificial Sequence
  Synthetic Polynucleotide
ccaaatcctccctgttt

SEQ ID NO: 7726 - DNA, 19 bp, Artificial Sequence
  Synthetic Polynucleotide
tcacactagacaacattac

SEQ ID NO: 7727 - DNA, 19 bp, Artificial Sequence
  Synthetic Polynucleotide
ccccatatctatgaacaga

SEQ ID NO: 7728 - DNA, 20 bp, Artificial Sequence
  Synthetic Polynucleotide
gagtctttacattttcaagc

SEQ ID NO: 7729 - DNA, 18 bp, Artificial Sequence
  Synthetic Polynucleotide
gtagtatacccatgcgtg

SEQ ID NO: 7730 - DNA, 17 bp, Artificial Sequence
  Synthetic Polynucleotide
caaaccgcattcacccc

SEQ ID NO: 7731 - DNA, 20 bp, Artificial Sequence
  Synthetic Polynucleotide
caagagtttactgtccgatg

SEQ ID NO: 7732 - DNA, 19 bp, Artificial Sequence
  Synthetic Polynucleotide
tcaacagaatcctttgctt

SEQ ID NO: 7733 - DNA, 17 bp, Artificial Sequence
  Synthetic Polynucleotide
ttgccagaggggataat

SEQ ID NO: 7734 - DNA, 17 bp, Artificial Sequence
  Synthetic Polynucleotide
tctcagggaccaaccct

SEQ ID NO: 7735 - DNA, 19 bp, Artificial Sequence
  Synthetic Polynucleotide
ctcaagatcatgtcgaagt

SEQ ID NO: 7736 - DNA, 17 bp, Artificial Sequence
  Synthetic Polynucleotide
cagcgataagccctagc

SEQ ID NO: 7737 - DNA, 17 bp, Artificial Sequence
  Synthetic Polynucleotide
ggaacaggcccatatac

SEQ ID NO: 7738 - DNA, 17 bp, Artificial Sequence
  Synthetic Polynucleotide
ttaatggtgtcaagggg

SEQ ID NO: 7739 - DNA, 17 bp, Artificial Sequence
  Synthetic Polynucleotide
aggctgatagatgtgca

SEQ ID NO: 7740 - DNA, 20 bp, Artificial Sequence
  Synthetic Polynucleotide
catttgtgtcatgtgttgac

SEQ ID NO: 7741 - DNA, 20 bp, Artificial Sequence
  Synthetic Polynucleotide
atcagtatctgctacttcaa

SEQ ID NO: 7742 - DNA, 19 bp, Artificial Sequence
  Synthetic Polynucleotide
ttgtagctcaagaacatgt

SEQ ID NO: 7743 - DNA, 18 bp, Artificial Sequence
  Synthetic Polynucleotide
aatgccaagacctgtacc

SEQ ID NO: 7744 - DNA, 18 bp, Artificial Sequence
  Synthetic Polynucleotide
aaatgaaagaagacgcta

SEQ ID NO: 7745 - DNA, 20 bp, Artificial Sequence
  Synthetic Polynucleotide
acttgagatacacagtaggt

SEQ ID NO: 7746 - DNA, 20 bp, Artificial Sequence
  Synthetic Polynucleotide
tgtgatcgttatcctatacg

SEQ ID NO: 7747 - DNA, 17 bp, Artificial Sequence
  Synthetic Polynucleotide
ggcgttccaatatgcat

SEQ ID NO: 7748 - DNA, 17 bp, Artificial Sequence
  Synthetic Polynucleotide
gatgcagaggtggttgc

SEQ ID NO: 7749 - DNA, 17 bp, Artificial Sequence
  Synthetic Polynucleotide
aagttgccagtaaagcc

SEQ ID NO: 7750 - DNA, 18 bp, Artificial Sequence
  Synthetic Polynucleotide
tacaggatgatagttggg

SEQ ID NO: 7751 - DNA, 17 bp, Artificial Sequence
  Synthetic Polynucleotide
cttccccaaaacctcct

SEQ ID NO: 7752 - DNA, 20 bp, Artificial Sequence
  Synthetic Polynucleotide
tttgatgaaatacttgaggg

SEQ ID NO: 7753 - DNA, 19 bp, Artificial Sequence
  Synthetic Polynucleotide
tccaacgagtgaatacacg

SEQ ID NO: 7754 - DNA, 17 bp, Artificial Sequence
  Synthetic Polynucleotide
ctcgagtgaagcgttat

SEQ ID NO: 7755 - DNA, 20 bp, Artificial Sequence
  Synthetic Polynucleotide
caaataccccttgcattatt

SEQ ID NO: 7756 - DNA, 17 bp, Artificial Sequence
  Synthetic Polynucleotide
cagttaagcgtggcatt

SEQ ID NO: 7757 - DNA, 20 bp, Artificial Sequence
  Synthetic Polynucleotide
gtgaatctgtgcttggttga

SEQ ID NO: 7758 - DNA, 20 bp, Artificial Sequence
  Synthetic Polynucleotide
taagcacacctttaataaac

SEQ ID NO: 7759 - DNA, 20 bp, Artificial Sequence
  Synthetic Polynucleotide
ggtaggcatatctgtaatct

SEQ ID NO: 7760 - DNA, 18 bp, Artificial Sequence
  Synthetic Polynucleotide
tggaaggaaaagctctta

SEQ ID NO: 7761 - DNA, 18 bp, Artificial Sequence
  Synthetic Polynucleotide
ataagcccaactgcgttt

SEQ ID NO: 7762 - DNA, 20 bp, Artificial Sequence
  Synthetic Polynucleotide
agttcatggaaatggaacta

SEQ ID NO: 7763 - DNA, 17 bp, Artificial Sequence
  Synthetic Polynucleotide
acctggttgaggaactt

SEQ ID NO: 7764 - DNA, 17 bp, Artificial Sequence
  Synthetic Polynucleotide
tcatcgaaggcaacatg

SEQ ID NO: 7765 - DNA, 17 bp, Artificial Sequence
  Synthetic Polynucleotide
cgacggatacaaatcct

SEQ ID NO: 7766 - DNA, 17 bp, Artificial Sequence
  Synthetic Polynucleotide
ggtacgggatagagtcg

SEQ ID NO: 7767 - DNA, 18 bp, Artificial Sequence
  Synthetic Polynucleotide
tcttctttactctctgcc

SEQ ID NO: 7768 - DNA, 20 bp, Artificial Sequence
  Synthetic Polynucleotide
tgctattcaacattcagtta

SEQ ID NO: 7769 - DNA, 18 bp, Artificial Sequence
  Synthetic Polynucleotide
atatgatgtcccagcgtg

SEQ ID NO: 7770 - DNA, 19 bp, Artificial Sequence
  Synthetic Polynucleotide
ttgtgaaactagtaaaccg

SEQ ID NO: 7771 - DNA, 17 bp, Artificial Sequence
  Synthetic Polynucleotide
aggacctgatcgaagac

SEQ ID NO: 7772 - DNA, 17 bp, Artificial Sequence
  Synthetic Polynucleotide
ctggcgatcttagacag

SEQ ID NO: 7773 - DNA, 17 bp, Artificial Sequence
  Synthetic Polynucleotide
aactgacccattctcag

SEQ ID NO: 7774 - DNA, 17 bp, Artificial Sequence
  Synthetic Polynucleotide
ccccagctcggaaaacg

SEQ ID NO: 7775 - DNA, 17 bp, Artificial Sequence
  Synthetic Polynucleotide
catggtcatgatacggg

SEQ ID NO: 7776 - DNA, 18 bp, Artificial Sequence
  Synthetic Polynucleotide
atgacagttcaaaagtgc

SEQ ID NO: 7777 - DNA, 17 bp, Artificial Sequence
  Synthetic Polynucleotide
gtagaacatcgtggtcg

SEQ ID NO: 7778 - DNA, 17 bp, Artificial Sequence
  Synthetic Polynucleotide
gctgctcaatctgtccg

SEQ ID NO: 7779 - DNA, 17 bp, Artificial Sequence
  Synthetic Polynucleotide
aacggtatgtcttgcag

SEQ ID NO: 7780 - DNA, 19 bp, Artificial Sequence
  Synthetic Polynucleotide
tggcggtaatccaactacc

SEQ ID NO: 7781 - DNA, 18 bp, Artificial Sequence
  Synthetic Polynucleotide
ttttggcaaccaatcctt

SEQ ID NO: 7782 - DNA, 20 bp, Artificial Sequence
  Synthetic Polynucleotide
aagatttaccacaagcagtg

SEQ ID NO: 7783 - DNA, 19 bp, Artificial Sequence
  Synthetic Polynucleotide
cgcatattacacagttacg

SEQ ID NO: 7784 - DNA, 17 bp, Artificial Sequence
  Synthetic Polynucleotide
gcaggacaaacacaagt

SEQ ID NO: 7785 - DNA, 17 bp, Artificial Sequence
  Synthetic Polynucleotide
gggtagttggattaccg

SEQ ID NO: 7786 - DNA, 17 bp, Artificial Sequence
  Synthetic Polynucleotide
gtactcacagaagccct

SEQ ID NO: 7787 - DNA, 20 bp, Artificial Sequence
  Synthetic Polynucleotide
atccgcacaagaagatgact

SEQ ID NO: 7788 - DNA, 19 bp, Artificial Sequence
  Synthetic Polynucleotide
ggatgacttcaaagaccca

SEQ ID NO: 7789 - DNA, 20 bp, Artificial Sequence
  Synthetic Polynucleotide
aagttgagcaaagttagcag

SEQ ID NO: 7790 - DNA, 19 bp, Artificial Sequence
  Synthetic Polynucleotide
ccgtccgaaaagaaaagat

SEQ ID NO: 7791 - DNA, 19 bp, Artificial Sequence
  Synthetic Polynucleotide
aagggagtagtagtattcg

SEQ ID NO: 7792 - DNA, 20 bp, Artificial Sequence
  Synthetic Polynucleotide
tcaatcaaacagataagcca

SEQ ID NO: 7793 - DNA, 19 bp, Artificial Sequence
  Synthetic Polynucleotide
cacgtcctccacataagcg

SEQ ID NO: 7794 - DNA, 18 bp, Artificial Sequence
  Synthetic Polynucleotide
gcacgcttacgacaacgt

SEQ ID NO: 7795 - DNA, 18 bp, Artificial Sequence
  Synthetic Polynucleotide
catctcgaccacgtagag

SEQ ID NO: 7796 - DNA, 20 bp, Artificial Sequence
  Synthetic Polynucleotide
cattagtttccgcaataagt

SEQ ID NO: 7797 - DNA, 17 bp, Artificial Sequence
  Synthetic Polynucleotide
aaaaccaccatcgaagt

SEQ ID NO: 7798 - DNA, 18 bp, Artificial Sequence
  Synthetic Polynucleotide
tgcctggataattactga

SEQ ID NO: 7799 - DNA, 17 bp, Artificial Sequence
  Synthetic Polynucleotide
acgaagccgaccgtctg

SEQ ID NO: 7800 - DNA, 18 bp, Artificial Sequence
  Synthetic Polynucleotide
ccttggaactcgtagatc

SEQ ID NO: 7801 - DNA, 17 bp, Artificial Sequence
  Synthetic Polynucleotide
tgatttctccgccctct

SEQ ID NO: 7802 - DNA, 19 bp, Artificial Sequence
  Synthetic Polynucleotide
gctatcacacagagctgac

SEQ ID NO: 7803 - DNA, 17 bp, Artificial Sequence
  Synthetic Polynucleotide
ccaagctgaccatgaac

SEQ ID NO: 7804 - DNA, 19 bp, Artificial Sequence
  Synthetic Polynucleotide
cctgccgcaatgatgatga

SEQ ID NO: 7805 - DNA, 17 bp, Artificial Sequence
  Synthetic Polynucleotide
gacgtacaccaccgctg

SEQ ID NO: 7806 - DNA, 18 bp, Artificial Sequence
  Synthetic Polynucleotide
cgcataccagtagtcact

SEQ ID NO: 7807 - DNA, 17 bp, Artificial Sequence
  Synthetic Polynucleotide
ccctccaataactcagg

SEQ ID NO: 7808 - DNA, 17 bp, Artificial Sequence
  Synthetic Polynucleotide
attcgcaaacaaagggt

SEQ ID NO: 7809 - DNA, 17 bp, Artificial Sequence
  Synthetic Polynucleotide
tcatttaatcgcctcca

SEQ ID NO: 7810 - DNA, 18 bp, Artificial Sequence
  Synthetic Polynucleotide
ggtctgaatacgaaaacg

SEQ ID NO: 7811 - DNA, 18 bp, Artificial Sequence
  Synthetic Polynucleotide
cttcaccctccacttcct

SEQ ID NO: 7812 - DNA, 18 bp, Artificial Sequence
  Synthetic Polynucleotide
aaggaggaacaagcatga

SEQ ID NO: 7813 - DNA, 18 bp, Artificial Sequence
  Synthetic Polynucleotide
agttgtgacttcgctagc

SEQ ID NO: 7814 - DNA, 17 bp, Artificial Sequence
  Synthetic Polynucleotide
acagcatggtcttacag

SEQ ID NO: 7815 - DNA, 17 bp, Artificial Sequence
  Synthetic Polynucleotide
acctcgccgaacagatc

SEQ ID NO: 7816 - DNA, 17 bp, Artificial Sequence
  Synthetic Polynucleotide
cgtcaacaatcacatcg

SEQ ID NO: 7817 - DNA, 18 bp, Artificial Sequence
  Synthetic Polynucleotide
tcggattcaaaacagccg

SEQ ID NO: 7818 - DNA, 17 bp, Artificial Sequence
  Synthetic Polynucleotide
cgacctcgatctcgccc

SEQ ID NO: 7819 - DNA, 20 bp, Artificial Sequence
  Synthetic Polynucleotide
cgtcggaaacgtattctttt

SEQ ID NO: 7820 - DNA, 17 bp, Artificial Sequence
  Synthetic Polynucleotide
tagaactggtgcttcag

SEQ ID NO: 7821 - DNA, 20 bp, Artificial Sequence
  Synthetic Polynucleotide
gtatgcaatcttttactggg

SEQ ID NO: 7822 - DNA, 17 bp, Artificial Sequence
  Synthetic Polynucleotide
tacaatccccgaactta

SEQ ID NO: 7823 - DNA, 20 bp, Artificial Sequence
  Synthetic Polynucleotide
ggaactggtttagattcttg

SEQ ID NO: 7824 - DNA, 19 bp, Artificial Sequence
  Synthetic Polynucleotide
gaacactcagctacttttg

SEQ ID NO: 7825 - DNA, 18 bp, Artificial Sequence
  Synthetic Polynucleotide
tatcgaaagttatccagc

SEQ ID NO: 7826 - DNA, 17 bp, Artificial Sequence
  Synthetic Polynucleotide
cctgaacttatcgccgc

SEQ ID NO: 7827 - DNA, 17 bp, Artificial Sequence
  Synthetic Polynucleotide
ggtgtccaaggcatccc

SEQ ID NO: 7828 - DNA, 19 bp, Artificial Sequence
  Synthetic Polynucleotide
aatcgaacgccgtactgtg

SEQ ID NO: 7829 - DNA, 17 bp, Artificial Sequence
  Synthetic Polynucleotide
gtcatcctcgtcgtctc

SEQ ID NO: 7830 - DNA, 17 bp, Artificial Sequence
  Synthetic Polynucleotide
tggccctgtgaccttcg

SEQ ID NO: 7831 - DNA, 17 bp, Artificial Sequence
  Synthetic Polynucleotide
cgcaagccctttaccgt

SEQ ID NO: 7832 - DNA, 17 bp, Artificial Sequence
  Synthetic Polynucleotide
ggcccttctttctttga

SEQ ID NO: 7833 - DNA, 18 bp, Artificial Sequence
  Synthetic Polynucleotide
ccacatcaatcactcacc

SEQ ID NO: 7834 - DNA, 19 bp, Artificial Sequence
  Synthetic Polynucleotide
tcattcgcttttagtgaga

SEQ ID NO: 7835 - DNA, 18 bp, Artificial Sequence
  Synthetic Polynucleotide
ccgctatcaaggattacg

SEQ ID NO: 7836 - DNA, 19 bp, Artificial Sequence
  Synthetic Polynucleotide
ttatcaacgccaatccttg

SEQ ID NO: 7837 - DNA, 19 bp, Artificial Sequence
  Synthetic Polynucleotide
tttgccaacgtcatataag

SEQ ID NO: 7838 - DNA, 17 bp, Artificial Sequence
  Synthetic Polynucleotide
gcaaccctgaatgacat

SEQ ID NO: 7839 - DNA, 18 bp, Artificial Sequence
  Synthetic Polynucleotide
agtctgctttgatttggt

SEQ ID NO: 7840 - DNA, 19 bp, Artificial Sequence
  Synthetic Polynucleotide
tagttactatttgccacaa

SEQ ID NO: 7841 - DNA, 20 bp, Artificial Sequence
  Synthetic Polynucleotide
cgattttagaagggttttct

SEQ ID NO: 7842 - DNA, 17 bp, Artificial Sequence
  Synthetic Polynucleotide
cgcaatggctcttaaaa

SEQ ID NO: 7843 - DNA, 19 bp, Artificial Sequence
  Synthetic Polynucleotide
agtgctttccaatttgtct

SEQ ID NO: 7844 - DNA, 18 bp, Artificial Sequence
  Synthetic Polynucleotide
ctggtgtgctgtctattg

SEQ ID NO: 7845 - DNA, 19 bp, Artificial Sequence
  Synthetic Polynucleotide
gtggctttctgtttctact

SEQ ID NO: 7846 - DNA, 19 bp, Artificial Sequence
  Synthetic Polynucleotide
actttactagcccgattcg

SEQ ID NO: 7847 - DNA, 20 bp, Artificial Sequence
  Synthetic Polynucleotide
gtagtaggacttgtcggtcg

SEQ ID NO: 7848 - DNA, 18 bp, Artificial Sequence
  Synthetic Polynucleotide
caactctaccatcgactc

SEQ ID NO: 7849 - DNA, 18 bp, Artificial Sequence
  Synthetic Polynucleotide
gtcttcttgtcgttgccg

SEQ ID NO: 7850 - DNA, 18 bp, Artificial Sequence
  Synthetic Polynucleotide
cctcatgccgattcaccc

SEQ ID NO: 7851 - DNA, 17 bp, Artificial Sequence
  Synthetic Polynucleotide
gctcctggctcacagaa

SEQ ID NO: 7852 - DNA, 18 bp, Artificial Sequence
  Synthetic Polynucleotide
ctcatcgttgacacgagc

SEQ ID NO: 7853 - DNA, 17 bp, Artificial Sequence
  Synthetic Polynucleotide
gaggcttatgaccagcc

SEQ ID NO: 7854 - DNA, 20 bp, Artificial Sequence
  Synthetic Polynucleotide
tttgaatagttttgacccat

SEQ ID NO: 7855 - DNA, 17 bp, Artificial Sequence
  Synthetic Polynucleotide
gccaccttggattacct

SEQ ID NO: 7856 - DNA, 19 bp, Artificial Sequence
  Synthetic Polynucleotide
cgtggctcaatcaggttca

SEQ ID NO: 7857 - DNA, 20 bp, Artificial Sequence
  Synthetic Polynucleotide
aaggtccattttgaatgtaa

SEQ ID NO: 7858 - DNA, 20 bp, Artificial Sequence
  Synthetic Polynucleotide
agctacaactcttatcagct

SEQ ID NO: 7859 - DNA, 20 bp, Artificial Sequence
  Synthetic Polynucleotide
atcaggtgcgtttgatagcg

SEQ ID NO: 7860 - DNA, 20 bp, Artificial Sequence
  Synthetic Polynucleotide
aggctctttaattcctagag

SEQ ID NO: 7861 - DNA, 18 bp, Artificial Sequence
  Synthetic Polynucleotide
gcccattcttttaccaaa

SEQ ID NO: 7862 - DNA, 19 bp, Artificial Sequence
  Synthetic Polynucleotide
aagactttggttacggttc

SEQ ID NO: 7863 - DNA, 20 bp, Artificial Sequence
  Synthetic Polynucleotide
tctgatgaattacgtctttc

SEQ ID NO: 7864 - DNA, 17 bp, Artificial Sequence
  Synthetic Polynucleotide
gatcacatggttacccg

SEQ ID NO: 7865 - DNA, 20 bp, Artificial Sequence
  Synthetic Polynucleotide
aagcgtttgttgttatcttt

SEQ ID NO: 7866 - DNA, 19 bp, Artificial Sequence
  Synthetic Polynucleotide
agtcagtctcatccgcttg

SEQ ID NO: 7867 - DNA, 19 bp, Artificial Sequence
  Synthetic Polynucleotide
catccttatccgtcaattc

SEQ ID NO: 7868 - DNA, 18 bp, Artificial Sequence
  Synthetic Polynucleotide
ggcaatcagataccaatc

SEQ ID NO: 7869 - DNA, 19 bp, Artificial Sequence
  Synthetic Polynucleotide
ttcgaattgtttcgcctat

SEQ ID NO: 7870 - DNA, 17 bp, Artificial Sequence
  Synthetic Polynucleotide
gcactggatcacgttca

SEQ ID NO: 7871 - DNA, 19 bp, Artificial Sequence
  Synthetic Polynucleotide
gaatggtagtcaatgcaaa

SEQ ID NO: 7872 - DNA, 18 bp, Artificial Sequence
  Synthetic Polynucleotide
aagcgagcgtttgggaca

SEQ ID NO: 7873 - DNA, 20 bp, Artificial Sequence
  Synthetic Polynucleotide
gcttcgagatcctcctggac

SEQ ID NO: 7874 - DNA, 18 bp, Artificial Sequence
  Synthetic Polynucleotide
ccctcggagtctgtgttc

SEQ ID NO: 7875 - DNA, 19 bp, Artificial Sequence
  Synthetic Polynucleotide
tcagcactttggagaacta

SEQ ID NO: 7876 - DNA, 17 bp, Artificial Sequence
  Synthetic Polynucleotide
attggcaccttgtacgc

SEQ ID NO: 7877 - DNA, 19 bp, Artificial Sequence
  Synthetic Polynucleotide
agtgaagccttctcaaaat

SEQ ID NO: 7878 - DNA, 17 bp, Artificial Sequence
  Synthetic Polynucleotide
atcctacccctgtggag

SEQ ID NO: 7879 - DNA, 17 bp, Artificial Sequence
  Synthetic Polynucleotide
ccaaaatgggcgacagg

SEQ ID NO: 7880 - DNA, 17 bp, Artificial Sequence
  Synthetic Polynucleotide
ccctgaacttgatggcc

SEQ ID NO: 7881 - DNA, 18 bp, Artificial Sequence
  Synthetic Polynucleotide
gagtttgtacctgttccg

SEQ ID NO: 7882 - DNA, 17 bp, Artificial Sequence
  Synthetic Polynucleotide
cggtaattgaaaaggcg

SEQ ID NO: 7883 - DNA, 20 bp, Artificial Sequence
  Synthetic Polynucleotide
ccataacacttccgtaaata

SEQ ID NO: 7884 - DNA, 19 bp, Artificial Sequence
  Synthetic Polynucleotide
ggaattggaatgctcattg

SEQ ID NO: 7885 - DNA, 17 bp, Artificial Sequence
  Synthetic Polynucleotide
cttgtgggcacctataa

SEQ ID NO: 7886 - DNA, 18 bp, Artificial Sequence
  Synthetic Polynucleotide
agacaccccgtatggctt

SEQ ID NO: 7887 - DNA, 20 bp, Artificial Sequence
  Synthetic Polynucleotide
gagactctcccagaacgaag

SEQ ID NO: 7888 - DNA, 20 bp, Artificial Sequence
  Synthetic Polynucleotide
aacatgctgctcaattttat

SEQ ID NO: 7889 - DNA, 18 bp, Artificial Sequence
  Synthetic Polynucleotide
tcatgaaagctagaggat

SEQ ID NO: 7890 - DNA, 19 bp, Artificial Sequence
  Synthetic Polynucleotide
tgctcggtcaccctgattc

SEQ ID NO: 7891 - DNA, 20 bp, Artificial Sequence
  Synthetic Polynucleotide
actttctgctgcgtcttcat

SEQ ID NO: 7892 - DNA, 17 bp, Artificial Sequence
  Synthetic Polynucleotide
agtcaaggctgcgaaag

SEQ ID NO: 7893 - DNA, 19 bp, Artificial Sequence
  Synthetic Polynucleotide
cgagacaaaactgtcgtgt

SEQ ID NO: 7894 - DNA, 17 bp, Artificial Sequence
  Synthetic Polynucleotide
cctggctcaacaacctc

SEQ ID NO: 7895 - DNA, 20 bp, Artificial Sequence
  Synthetic Polynucleotide
agctaactacgtccttcttg

SEQ ID NO: 7896 - DNA, 17 bp, Artificial Sequence
  Synthetic Polynucleotide
tgacaatttcaccgctg

SEQ ID NO: 7897 - DNA, 17 bp, Artificial Sequence
  Synthetic Polynucleotide
cgctggttgagcccaac

SEQ ID NO: 7898 - DNA, 17 bp, Artificial Sequence
  Synthetic Polynucleotide
ggggagagggtctcttt

SEQ ID NO: 7899 - DNA, 18 bp, Artificial Sequence
  Synthetic Polynucleotide
gtcttgcagtaggacagc

SEQ ID NO: 7900 - DNA, 17 bp, Artificial Sequence
  Synthetic Polynucleotide
aggacggcacgcaaact

SEQ ID NO: 7901 - DNA, 17 bp, Artificial Sequence
  Synthetic Polynucleotide
ttatgcaccacgcttcc

SEQ ID NO: 7902 - DNA, 17 bp, Artificial Sequence
  Synthetic Polynucleotide
ctggggaaggtagacgc

SEQ ID NO: 7903 - DNA, 19 bp, Artificial Sequence
  Synthetic Polynucleotide
tttcttggcagttttcttt

SEQ ID NO: 7904 - DNA, 17 bp, Artificial Sequence
  Synthetic Polynucleotide
acagaacacgagtacgt

SEQ ID NO: 7905 - DNA, 17 bp, Artificial Sequence
  Synthetic Polynucleotide
attcgctggttgagccc

SEQ ID NO: 7906 - DNA, 17 bp, Artificial Sequence
  Synthetic Polynucleotide
gagcattttcgcatctg

SEQ ID NO: 7907 - DNA, 19 bp, Artificial Sequence
  Synthetic Polynucleotide
ccctttcgttgtacaccat

SEQ ID NO: 7908 - DNA, 18 bp, Artificial Sequence
  Synthetic Polynucleotide
caccaacatcgctgtacc

SEQ ID NO: 7909 - DNA, 17 bp, Artificial Sequence
  Synthetic Polynucleotide
ccgtcgcaactaactat

SEQ ID NO: 7910 - DNA, 17 bp, Artificial Sequence
  Synthetic Polynucleotide
tggagaaagttcacgtt

SEQ ID NO: 7911 - DNA, 17 bp, Artificial Sequence
  Synthetic Polynucleotide
catctccgtagagttcg

SEQ ID NO: 7912 - DNA, 20 bp, Artificial Sequence
  Synthetic Polynucleotide
cccctgaatagtaacaaaat

SEQ ID NO: 7913 - DNA, 17 bp, Artificial Sequence
  Synthetic Polynucleotide
gggagagggtatccttt

SEQ ID NO: 7914 - DNA, 18 bp, Artificial Sequence
  Synthetic Polynucleotide
aaaacagtatgcacctcc

SEQ ID NO: 7915 - DNA, 18 bp, Artificial Sequence
  Synthetic Polynucleotide
taccaccatgaacagagg

SEQ ID NO: 7916 - DNA, 19 bp, Artificial Sequence
  Synthetic Polynucleotide
tcagaggcaggttaaggta

SEQ ID NO: 7917 - DNA, 19 bp, Artificial Sequence
  Synthetic Polynucleotide
gagttgtaaagtaaaggcc

SEQ ID NO: 7918 - DNA, 18 bp, Artificial Sequence
  Synthetic Polynucleotide
ggaagtatgtagggacac

SEQ ID NO: 7919 - DNA, 17 bp, Artificial Sequence
  Synthetic Polynucleotide
aaacggcaggttcacgg

SEQ ID NO: 7920 - DNA, 20 bp, Artificial Sequence
  Synthetic Polynucleotide
tcatcatagcaccaaattta

SEQ ID NO: 7921 - DNA, 19 bp, Artificial Sequence
  Synthetic Polynucleotide
ccatccacgcaggtatctt

SEQ ID NO: 7922 - DNA, 17 bp, Artificial Sequence
  Synthetic Polynucleotide
taaagtctccgcattta

SEQ ID NO: 7923 - DNA, 17 bp, Artificial Sequence
  Synthetic Polynucleotide
ccgcacatttgtcggga

SEQ ID NO: 7924 - DNA, 19 bp, Artificial Sequence
  Synthetic Polynucleotide
catcagtattgtcgaatgc

SEQ ID NO: 7925 - DNA, 18 bp, Artificial Sequence
  Synthetic Polynucleotide
ccacacacgagtataggc

SEQ ID NO: 7926 - DNA, 17 bp, Artificial Sequence
  Synthetic Polynucleotide
ccatgttccacactttg

SEQ ID NO: 7927 - DNA, 17 bp, Artificial Sequence
  Synthetic Polynucleotide
cacatcatccacgcagt

SEQ ID NO: 7928 - DNA, 17 bp, Artificial Sequence
  Synthetic Polynucleotide
atatgcagactctccac

SEQ ID NO: 7929 - DNA, 19 bp, Artificial Sequence
  Synthetic Polynucleotide
gtctttccccgttcaggaa

SEQ ID NO: 7930 - DNA, 19 bp, Artificial Sequence
  Synthetic Polynucleotide
ttagccagaccgcactaca

SEQ ID NO: 7931 - DNA, 18 bp, Artificial Sequence
  Synthetic Polynucleotide
cagatttacaacgtgcca

SEQ ID NO: 7932 - DNA, 19 bp, Artificial Sequence
  Synthetic Polynucleotide
gatcgaaatgtgttgagtc

SEQ ID NO: 7933 - DNA, 17 bp, Artificial Sequence
  Synthetic Polynucleotide
taccgtgacatacaact

SEQ ID NO: 7934 - DNA, 18 bp, Artificial Sequence
  Synthetic Polynucleotide
gttttcatgccccagaga

SEQ ID NO: 7935 - DNA, 19 bp, Artificial Sequence
  Synthetic Polynucleotide
cgccaagttatcccggttt

SEQ ID NO: 7936 - DNA, 19 bp, Artificial Sequence
  Synthetic Polynucleotide
attgcccattccacagata

SEQ ID NO: 7937 - DNA, 18 bp, Artificial Sequence
  Synthetic Polynucleotide
gcgatctcttttgtccgc

SEQ ID NO: 7938 - DNA, 18 bp, Artificial Sequence
  Synthetic Polynucleotide
accataggcccgagaaga

SEQ ID NO: 7939 - DNA, 20 bp, Artificial Sequence
  Synthetic Polynucleotide
cgtgagtaatttaacgacgg

SEQ ID NO: 7940 - DNA, 20 bp, Artificial Sequence
  Synthetic Polynucleotide
tttccacatgtttgcccaga

SEQ ID NO: 7941 - DNA, 19 bp, Artificial Sequence
  Synthetic Polynucleotide
ttcaacttttagtttgccc

SEQ ID NO: 7942 - DNA, 19 bp, Artificial Sequence
  Synthetic Polynucleotide
acacagaggttttccctct

SEQ ID NO: 7943 - DNA, 19 bp, Artificial Sequence
  Synthetic Polynucleotide
gagtagttcccgtacccgc

SEQ ID NO: 7944 - DNA, 20 bp, Artificial Sequence
  Synthetic Polynucleotide
catccacatccccttcagat

SEQ ID NO: 7945 - DNA, 20 bp, Artificial Sequence
  Synthetic Polynucleotide
gtcacaattccagaaaccat

SEQ ID NO: 7946 - DNA, 17 bp, Artificial Sequence
  Synthetic Polynucleotide
caagtaacgtcccactt

SEQ ID NO: 7947 - DNA, 17 bp, Artificial Sequence
  Synthetic Polynucleotide
ctgccccgctatgacac

SEQ ID NO: 7948 - DNA, 17 bp, Artificial Sequence
  Synthetic Polynucleotide
tctccatcctgcttgtg

SEQ ID NO: 7949 - DNA, 19 bp, Artificial Sequence
  Synthetic Polynucleotide
cgctattacaagtcagaac

SEQ ID NO: 7950 - DNA, 19 bp, Artificial Sequence
  Synthetic Polynucleotide
acttttcccctcactgttc

SEQ ID NO: 7951 - DNA, 19 bp, Artificial Sequence
  Synthetic Polynucleotide
aacttcgaccagtacagat

SEQ ID NO: 7952 - DNA, 17 bp, Artificial Sequence
  Synthetic Polynucleotide
agagacagcccgccttc

SEQ ID NO: 7953 - DNA, 18 bp, Artificial Sequence
  Synthetic Polynucleotide
cagattagtgattcccgc

SEQ ID NO: 7954 - DNA, 17 bp, Artificial Sequence
  Synthetic Polynucleotide
acgcataccaactcgca

SEQ ID NO: 7955 - DNA, 17 bp, Artificial Sequence
  Synthetic Polynucleotide
gacgcacagagccaaca

SEQ ID NO: 7956 - DNA, 19 bp, Artificial Sequence
  Synthetic Polynucleotide
acacaatcatccccattgt

SEQ ID NO: 7957 - DNA, 18 bp, Artificial Sequence
  Synthetic Polynucleotide
aaccttcgccatgactgt

SEQ ID NO: 7958 - DNA, 19 bp, Artificial Sequence
  Synthetic Polynucleotide
agtgatcatgcactccgta

SEQ ID NO: 7959 - DNA, 17 bp, Artificial Sequence
  Synthetic Polynucleotide
atggttccattggcggt

SEQ ID NO: 7960 - DNA, 17 bp, Artificial Sequence
  Synthetic Polynucleotide
aacaacccaattacccc

SEQ ID NO: 7961 - DNA, 17 bp, Artificial Sequence
  Synthetic Polynucleotide
ggctgtagaatgagcgg

SEQ ID NO: 7962 - DNA, 20 bp, Artificial Sequence
  Synthetic Polynucleotide
gtagctggtataggttcaag

SEQ ID NO: 7963 - DNA, 18 bp, Artificial Sequence
  Synthetic Polynucleotide
gccctccagtttgaacat

SEQ ID NO: 7964 - DNA, 18 bp, Artificial Sequence
  Synthetic Polynucleotide
ggaacaattctccgagtc

SEQ ID NO: 7965 - DNA, 17 bp, Artificial Sequence
  Synthetic Polynucleotide
cagcaaagcccagaaga

SEQ ID NO: 7966 - DNA, 20 bp, Artificial Sequence
  Synthetic Polynucleotide
ggaggcgtcaaatcctattg

SEQ ID NO: 7967 - DNA, 19 bp, Artificial Sequence
  Synthetic Polynucleotide
ctcaccaaaatcgtgctag

SEQ ID NO: 7968 - DNA, 20 bp, Artificial Sequence
  Synthetic Polynucleotide
cataatgcgtggactattct

SEQ ID NO: 7969 - DNA, 17 bp, Artificial Sequence
  Synthetic Polynucleotide
agtgattgaccatcacg

SEQ ID NO: 7970 - DNA, 17 bp, Artificial Sequence
  Synthetic Polynucleotide
gttcatgtccccactca

SEQ ID NO: 7971 - DNA, 17 bp, Artificial Sequence
  Synthetic Polynucleotide
aagccttgtcgagactc

SEQ ID NO: 7972 - DNA, 18 bp, Artificial Sequence
  Synthetic Polynucleotide
accctaccaaaatccacc

SEQ ID NO: 7973 - DNA, 18 bp, Artificial Sequence
  Synthetic Polynucleotide
gatgtggccctatctaaa

SEQ ID NO: 7974 - DNA, 18 bp, Artificial Sequence
  Synthetic Polynucleotide
ctcgcacctgtttattga

SEQ ID NO: 7975 - DNA, 19 bp, Artificial Sequence
  Synthetic Polynucleotide
aatcattagctgatcgagc

SEQ ID NO: 7976 - DNA, 18 bp, Artificial Sequence
  Synthetic Polynucleotide
cggttccctgttttatta

SEQ ID NO: 7977 - DNA, 18 bp, Artificial Sequence
  Synthetic Polynucleotide
ggttgccttcttgtgttc

SEQ ID NO: 7978 - DNA, 18 bp, Artificial Sequence
  Synthetic Polynucleotide
gtacccgtgtgaacttat

SEQ ID NO: 7979 - DNA, 20 bp, Artificial Sequence
  Synthetic Polynucleotide
tgctgatattatcgaacatg

SEQ ID NO: 7980 - DNA, 19 bp, Artificial Sequence
  Synthetic Polynucleotide
cctacgacccttttaaact

SEQ ID NO: 7981 - DNA, 17 bp, Artificial Sequence
  Synthetic Polynucleotide
gttgcaaaacgtatcgt

SEQ ID NO: 7982 - DNA, 18 bp, Artificial Sequence
  Synthetic Polynucleotide
gaagcactctgtgggtaa

SEQ ID NO: 7983 - DNA, 18 bp, Artificial Sequence
  Synthetic Polynucleotide
gtacgtgctgtaatctcc

SEQ ID NO: 7984 - DNA, 19 bp, Artificial Sequence
  Synthetic Polynucleotide
gatttcgggacttgggttg

SEQ ID NO: 7985 - DNA, 18 bp, Artificial Sequence
  Synthetic Polynucleotide
ctatggtgggaatacgtc

SEQ ID NO: 7986 - DNA, 18 bp, Artificial Sequence
  Synthetic Polynucleotide
ttaggctgctgacggatg

SEQ ID NO: 7987 - DNA, 18 bp, Artificial Sequence
  Synthetic Polynucleotide
atgaagcaatcggtaggt

SEQ ID NO: 7988 - DNA, 20 bp, Artificial Sequence
  Synthetic Polynucleotide
tgaagaaatcactgtaaggc

SEQ ID NO: 7989 - DNA, 18 bp, Artificial Sequence
  Synthetic Polynucleotide
ccttcgccaatgacggtg

SEQ ID NO: 7990 - DNA, 18 bp, Artificial Sequence
  Synthetic Polynucleotide
ccactcaaaacggtatgc

SEQ ID NO: 7991 - DNA, 17 bp, Artificial Sequence
  Synthetic Polynucleotide
gctgactacggtcggtg

SEQ ID NO: 7992 - DNA, 19 bp, Artificial Sequence
  Synthetic Polynucleotide
agtggtgggagttgaagtc

SEQ ID NO: 7993 - DNA, 18 bp, Artificial Sequence
  Synthetic Polynucleotide
ctggacgagacctctctc

SEQ ID NO: 7994 - DNA, 18 bp, Artificial Sequence
  Synthetic Polynucleotide
atcaggtaaggaagctgt

SEQ ID NO: 7995 - DNA, 17 bp, Artificial Sequence
  Synthetic Polynucleotide
ttgtcgaacttggacag

SEQ ID NO: 7996 - DNA, 17 bp, Artificial Sequence
  Synthetic Polynucleotide
cacttgatgagacggac

SEQ ID NO: 7997 - DNA, 17 bp, Artificial Sequence
  Synthetic Polynucleotide
ggctggatgccaatact

SEQ ID NO: 7998 - DNA, 17 bp, Artificial Sequence
  Synthetic Polynucleotide
ggactgttgggaacgta

SEQ ID NO: 7999 - DNA, 20 bp, Artificial Sequence
  Synthetic Polynucleotide
cgtgtcttagggaaccaaat

SEQ ID NO: 8000 - DNA, 19 bp, Artificial Sequence
  Synthetic Polynucleotide
ttacttgaggagtaaccat

SEQ ID NO: 8001 - DNA, 20 bp, Artificial Sequence
  Synthetic Polynucleotide
ggaaattgcgtggtgtattg

SEQ ID NO: 8002 - DNA, 17 bp, Artificial Sequence
  Synthetic Polynucleotide
gtaggtgtgtgtcgcct

SEQ ID NO: 8003 - DNA, 17 bp, Artificial Sequence
  Synthetic Polynucleotide
aagttgggtcaatgagc

SEQ ID NO: 8004 - DNA, 19 bp, Artificial Sequence
  Synthetic Polynucleotide
cacttataaaggtggggaa

SEQ ID NO: 8005 - DNA, 20 bp, Artificial Sequence
  Synthetic Polynucleotide
ttatagacggtacaaaacta

SEQ ID NO: 8006 - DNA, 20 bp, Artificial Sequence
  Synthetic Polynucleotide
gggaatgtgttataggaaac

SEQ ID NO: 8007 - DNA, 18 bp, Artificial Sequence
  Synthetic Polynucleotide
aacgagtttgttgggtaa

SEQ ID NO: 8008 - DNA, 18 bp, Artificial Sequence
  Synthetic Polynucleotide
actcttgttcttgatgcc

SEQ ID NO: 8009 - DNA, 17 bp, Artificial Sequence
  Synthetic Polynucleotide
caatcggggtggtgagg

SEQ ID NO: 8010 - DNA, 18 bp, Artificial Sequence
  Synthetic Polynucleotide
gttgtgtttgtgaagtcg

SEQ ID NO: 8011 - DNA, 20 bp, Artificial Sequence
  Synthetic Polynucleotide
gagaagcaatcaatcaaata

SEQ ID NO: 8012 - DNA, 19 bp, Artificial Sequence
  Synthetic Polynucleotide
atacgaatcctgttgacta

SEQ ID NO: 8013 - DNA, 19 bp, Artificial Sequence
  Synthetic Polynucleotide
acttttccgagatagctga

SEQ ID NO: 8014 - DNA, 17 bp, Artificial Sequence
  Synthetic Polynucleotide
ggaatccatccgaagaa

SEQ ID NO: 8015 - DNA, 19 bp, Artificial Sequence
  Synthetic Polynucleotide
ttgaagccttgactgaaac

SEQ ID NO: 8016 - DNA, 19 bp, Artificial Sequence
  Synthetic Polynucleotide
gccgaccttttccttgcac

SEQ ID NO: 8017 - DNA, 18 bp, Artificial Sequence
  Synthetic Polynucleotide
acggtatcgagagaatgg

SEQ ID NO: 8018 - DNA, 19 bp, Artificial Sequence
  Synthetic Polynucleotide
cctgcctgaacctctcctc

SEQ ID NO: 8019 - DNA, 19 bp, Artificial Sequence
  Synthetic Polynucleotide
ccaatacccatcagtagca

SEQ ID NO: 8020 - DNA, 17 bp, Artificial Sequence
  Synthetic Polynucleotide
tccacccgacattgtaa

SEQ ID NO: 8021 - DNA, 19 bp, Artificial Sequence
  Synthetic Polynucleotide
acgacccagtgttcaatag

SEQ ID NO: 8022 - DNA, 20 bp, Artificial Sequence
  Synthetic Polynucleotide
gcgcacgatttcatagcaat

SEQ ID NO: 8023 - DNA, 19 bp, Artificial Sequence
  Synthetic Polynucleotide
gatcatctcacgctcacag

SEQ ID NO: 8024 - DNA, 19 bp, Artificial Sequence
  Synthetic Polynucleotide
gctgtcatctatagttgtg

SEQ ID NO: 8025 - DNA, 20 bp, Artificial Sequence
  Synthetic Polynucleotide
tgttgcccataatagagttc

SEQ ID NO: 8026 - DNA, 19 bp, Artificial Sequence
  Synthetic Polynucleotide
tagttggtcaccttagtgt

SEQ ID NO: 8027 - DNA, 17 bp, Artificial Sequence
  Synthetic Polynucleotide
ctgctcccagcctgaaa

SEQ ID NO: 8028 - DNA, 19 bp, Artificial Sequence
  Synthetic Polynucleotide
agtgaagcaattcagactc

SEQ ID NO: 8029 - DNA, 17 bp, Artificial Sequence
  Synthetic Polynucleotide
caacacaaagtcaacga

SEQ ID NO: 8030 - DNA, 17 bp, Artificial Sequence
  Synthetic Polynucleotide
gaggcaatggtgacggc

SEQ ID NO: 8031 - DNA, 17 bp, Artificial Sequence
  Synthetic Polynucleotide
ggccacttctccctccg

SEQ ID NO: 8032 - DNA, 19 bp, Artificial Sequence
  Synthetic Polynucleotide
ggttttgagatggacgtgc

SEQ ID NO: 8033 - DNA, 19 bp, Artificial Sequence
  Synthetic Polynucleotide
aacacaaagtcaatgatgg

SEQ ID NO: 8034 - DNA, 19 bp, Artificial Sequence
  Synthetic Polynucleotide
atcctgtgaagtccgtgac

SEQ ID NO: 8035 - DNA, 18 bp, Artificial Sequence
  Synthetic Polynucleotide
gctctcttccaagaccca

SEQ ID NO: 8036 - DNA, 20 bp, Artificial Sequence
  Synthetic Polynucleotide
gcatgagattcggaagtcgt

SEQ ID NO: 8037 - DNA, 18 bp, Artificial Sequence
  Synthetic Polynucleotide
agcaacaaacccgagcac

SEQ ID NO: 8038 - DNA, 17 bp, Artificial Sequence
  Synthetic Polynucleotide
gtgttgtcgtcgtaggt

SEQ ID NO: 8039 - DNA, 18 bp, Artificial Sequence
  Synthetic Polynucleotide
cgcaattctaacctcgtc

SEQ ID NO: 8040 - DNA, 18 bp, Artificial Sequence
  Synthetic Polynucleotide
ggctgaacaaggatggag

SEQ ID NO: 8041 - DNA, 20 bp, Artificial Sequence
  Synthetic Polynucleotide
gttctctttcctaactccac

SEQ ID NO: 8042 - DNA, 19 bp, Artificial Sequence
  Synthetic Polynucleotide
gtcaacgcagatcatcagt

SEQ ID NO: 8043 - DNA, 19 bp, Artificial Sequence
  Synthetic Polynucleotide
ctggcttttcgttctctct

SEQ ID NO: 8044 - DNA, 18 bp, Artificial Sequence
  Synthetic Polynucleotide
gatgttggtgagcctagg

SEQ ID NO: 8045 - DNA, 18 bp, Artificial Sequence
  Synthetic Polynucleotide
ctctcttcttctttccca

SEQ ID NO: 8046 - DNA, 20 bp, Artificial Sequence
  Synthetic Polynucleotide
acatagtatccgcagaacag

SEQ ID NO: 8047 - DNA, 18 bp, Artificial Sequence
  Synthetic Polynucleotide
gcagtcctcgaacaagac

SEQ ID NO: 8048 - DNA, 17 bp, Artificial Sequence
  Synthetic Polynucleotide
tatcaaatcctcctcgt

SEQ ID NO: 8049 - DNA, 18 bp, Artificial Sequence
  Synthetic Polynucleotide
tttgatgcgtttcttacc

SEQ ID NO: 8050 - DNA, 17 bp, Artificial Sequence
  Synthetic Polynucleotide
tccaactcccacgccat

SEQ ID NO: 8051 - DNA, 17 bp, Artificial Sequence
  Synthetic Polynucleotide
aggggctcgttggtcca

SEQ ID NO: 8052 - DNA, 18 bp, Artificial Sequence
  Synthetic Polynucleotide
tggggttcctaaacttgt

SEQ ID NO: 8053 - DNA, 17 bp, Artificial Sequence
  Synthetic Polynucleotide
tacatgcacatcgccgg

SEQ ID NO: 8054 - DNA, 17 bp, Artificial Sequence
  Synthetic Polynucleotide
gctatcatcccatttgc

SEQ ID NO: 8055 - DNA, 18 bp, Artificial Sequence
  Synthetic Polynucleotide
ctccttcttcaggatgaa

SEQ ID NO: 8056 - DNA, 17 bp, Artificial Sequence
  Synthetic Polynucleotide
aagaactggttgcttgg

SEQ ID NO: 8057 - DNA, 17 bp, Artificial Sequence
  Synthetic Polynucleotide
atggtcttacatgcaca

SEQ ID NO: 8058 - DNA, 18 bp, Artificial Sequence
  Synthetic Polynucleotide
tgacctcttccttctctt

SEQ ID NO: 8059 - DNA, 18 bp, Artificial Sequence
  Synthetic Polynucleotide
tgactcggggtaatattg

SEQ ID NO: 8060 - DNA, 18 bp, Artificial Sequence
  Synthetic Polynucleotide
agggtagaaattgtagcg

SEQ ID NO: 8061 - DNA, 18 bp, Artificial Sequence
  Synthetic Polynucleotide
atagcggatactattcgg

SEQ ID NO: 8062 - DNA, 17 bp, Artificial Sequence
  Synthetic Polynucleotide
acgttttcactgacggt

SEQ ID NO: 8063 - DNA, 17 bp, Artificial Sequence
  Synthetic Polynucleotide
caggtgtactggtccct

SEQ ID NO: 8064 - DNA, 17 bp, Artificial Sequence
  Synthetic Polynucleotide
atgctgcttcttccttc

SEQ ID NO: 8065 - DNA, 18 bp, Artificial Sequence
  Synthetic Polynucleotide
gacatggtttggttttgt

SEQ ID NO: 8066 - DNA, 17 bp, Artificial Sequence
  Synthetic Polynucleotide
ggcttggttccacatgc

SEQ ID NO: 8067 - DNA, 18 bp, Artificial Sequence
  Synthetic Polynucleotide
aacaggccgaactttatc

SEQ ID NO: 8068 - DNA, 18 bp, Artificial Sequence
  Synthetic Polynucleotide
ccctcttaccttggtgta

SEQ ID NO: 8069 - DNA, 18 bp, Artificial Sequence
  Synthetic Polynucleotide
tctgctttctcttttgct

SEQ ID NO: 8070 - DNA, 17 bp, Artificial Sequence
  Synthetic Polynucleotide
aagctccactcataggt

SEQ ID NO: 8071 - DNA, 17 bp, Artificial Sequence
  Synthetic Polynucleotide
cccttcaatcatcaccg

SEQ ID NO: 8072 - DNA, 18 bp, Artificial Sequence
  Synthetic Polynucleotide
cgacgttgaaacatacac

SEQ ID NO: 8073 - DNA, 18 bp, Artificial Sequence
  Synthetic Polynucleotide
atctttccgtttctgggc

SEQ ID NO: 8074 - DNA, 17 bp, Artificial Sequence
  Synthetic Polynucleotide
ctgtgagtaacactggc

SEQ ID NO: 8075 - DNA, 17 bp, Artificial Sequence
  Synthetic Polynucleotide
gttcctggtccaaatgt

SEQ ID NO: 8076 - DNA, 18 bp, Artificial Sequence
  Synthetic Polynucleotide
tttgatcattggtggcat

SEQ ID NO: 8077 - DNA, 18 bp, Artificial Sequence
  Synthetic Polynucleotide
aatctattgctgttgcca

SEQ ID NO: 8078 - DNA, 18 bp, Artificial Sequence
  Synthetic Polynucleotide
ctagttgtcccatttcca

SEQ ID NO: 8079 - DNA, 18 bp, Artificial Sequence
  Synthetic Polynucleotide
tccagatccattagaacc

SEQ ID NO: 8080 - DNA, 17 bp, Artificial Sequence
  Synthetic Polynucleotide
gatgcaatgccaggagt

SEQ ID NO: 8081 - DNA, 17 bp, Artificial Sequence
  Synthetic Polynucleotide
actggggaggcactgct

SEQ ID NO: 8082 - DNA, 17 bp, Artificial Sequence
  Synthetic Polynucleotide
tttgtttggggagatga

SEQ ID NO: 8083 - DNA, 18 bp, Artificial Sequence
  Synthetic Polynucleotide
tctaggttcacagcacct

SEQ ID NO: 8084 - DNA, 18 bp, Artificial Sequence
  Synthetic Polynucleotide
caaggctccgatgacatc

SEQ ID NO: 8085 - DNA, 18 bp, Artificial Sequence
  Synthetic Polynucleotide
tggagagtcagggaggcc

SEQ ID NO: 8086 - DNA, 18 bp, Artificial Sequence
  Synthetic Polynucleotide
gtggatgcaatgagtcaa

SEQ ID NO: 8087 - DNA, 17 bp, Artificial Sequence
  Synthetic Polynucleotide
agctaggtcaaagctct

SEQ ID NO: 8088 - DNA, 18 bp, Artificial Sequence
  Synthetic Polynucleotide
tgttgaacttgagtcctg

SEQ ID NO: 8089 - DNA, 18 bp, Artificial Sequence
  Synthetic Polynucleotide
ctttccatttcttctcga

SEQ ID NO: 8090 - DNA, 17 bp, Artificial Sequence
  Synthetic Polynucleotide
tcatgtttgatgcaaca

SEQ ID NO: 8091 - DNA, 17 bp, Artificial Sequence
  Synthetic Polynucleotide
gattggttgtgggagag

SEQ ID NO: 8092 - DNA, 18 bp, Artificial Sequence
  Synthetic Polynucleotide
gtgaggggttatttcctc

SEQ ID NO: 8093 - DNA, 17 bp, Artificial Sequence
  Synthetic Polynucleotide
tcaataacaggaagggc

SEQ ID NO: 8094 - DNA, 17 bp, Artificial Sequence
  Synthetic Polynucleotide
tcacaaatactcgggag

SEQ ID NO: 8095 - DNA, 17 bp, Artificial Sequence
  Synthetic Polynucleotide
tccagattgtgtctgat

SEQ ID NO: 8096 - DNA, 17 bp, Artificial Sequence
  Synthetic Polynucleotide
gtgatccaatcgttgtc

SEQ ID NO: 8097 - DNA, 18 bp, Artificial Sequence
  Synthetic Polynucleotide
atcgatgttcttgatgct

SEQ ID NO: 8098 - DNA, 18 bp, Artificial Sequence
  Synthetic Polynucleotide
acaatgtgtctatgggtt

SEQ ID NO: 8099 - DNA, 18 bp, Artificial Sequence
  Synthetic Polynucleotide
agagatgctacaaaagga

SEQ ID NO: 8100 - DNA, 18 bp, Artificial Sequence
  Synthetic Polynucleotide
ctggtcttgtttctggtt

SEQ ID NO: 8101 - DNA, 17 bp, Artificial Sequence
  Synthetic Polynucleotide
aatgaatggttgtggga

SEQ ID NO: 8102 - DNA, 18 bp, Artificial Sequence
  Synthetic Polynucleotide
tgagttgggtgtttgggt

SEQ ID NO: 8103 - DNA, 17 bp, Artificial Sequence
  Synthetic Polynucleotide
agcaccatcttcagatg

SEQ ID NO: 8104 - DNA, 17 bp, Artificial Sequence
  Synthetic Polynucleotide
catgttcgtggatgaga

SEQ ID NO: 8105 - DNA, 18 bp, Artificial Sequence
  Synthetic Polynucleotide
tagaagtccaggttgggc

SEQ ID NO: 8106 - DNA, 18 bp, Artificial Sequence
  Synthetic Polynucleotide
ctcacagaatagaaggga

SEQ ID NO: 8107 - DNA, 17 bp, Artificial Sequence
  Synthetic Polynucleotide
agaggtggagagtcagg

SEQ ID NO: 8108 - DNA, 18 bp, Artificial Sequence
  Synthetic Polynucleotide
agttcagagagatgtggt

SEQ ID NO: 8109 - DNA, 17 bp, Artificial Sequence
  Synthetic Polynucleotide
tgattgttcttgggtga

SEQ ID NO: 8110 - DNA, 18 bp, Artificial Sequence
  Synthetic Polynucleotide
tggcttatatccaatggg

SEQ ID NO: 8111 - DNA, 18 bp, Artificial Sequence
  Synthetic Polynucleotide
gggagtagtcgttgagaa

SEQ ID NO: 8112 - DNA, 18 bp, Artificial Sequence
  Synthetic Polynucleotide
ttataggcaagagggagt

SEQ ID NO: 8113 - DNA, 17 bp, Artificial Sequence
  Synthetic Polynucleotide
gccaaagagatgctaga

SEQ ID NO: 8114 - DNA, 18 bp, Artificial Sequence
  Synthetic Polynucleotide
ctcggttgacattctaca

SEQ ID NO: 8115 - DNA, 18 bp, Artificial Sequence
  Synthetic Polynucleotide
agagaatatgaggcaaga

SEQ ID NO: 8116 - DNA, 18 bp, Artificial Sequence
  Synthetic Polynucleotide
ggaaaagtttgggcactt

SEQ ID NO: 8117 - DNA, 18 bp, Artificial Sequence
  Synthetic Polynucleotide
taagagtggttttggaat

SEQ ID NO: 8118 - DNA, 17 bp, Artificial Sequence
  Synthetic Polynucleotide
cctgaaagcgggaacta

SEQ ID NO: 8119 - DNA, 17 bp, Artificial Sequence
  Synthetic Polynucleotide
gtttctcacagagtgga

SEQ ID NO: 8120 - DNA, 17 bp, Artificial Sequence
  Synthetic Polynucleotide
gatgggttgggattcca

SEQ ID NO: 8121 - DNA, 17 bp, Artificial Sequence
  Synthetic Polynucleotide
tagttttcaaagctgcc

SEQ ID NO: 8122 - DNA, 17 bp, Artificial Sequence
  Synthetic Polynucleotide
ttgttatgttggctggg

SEQ ID NO: 8123 - DNA, 18 bp, Artificial Sequence
  Synthetic Polynucleotide
tgtggggtttagggcaag

SEQ ID NO: 8124 - DNA, 17 bp, Artificial Sequence
  Synthetic Polynucleotide
gcgaaaggaatatgcag

SEQ ID NO: 8125 - DNA, 17 bp, Artificial Sequence
  Synthetic Polynucleotide
ggtccgatgacataagg

SEQ ID NO: 8126 - DNA, 18 bp, Artificial Sequence
  Synthetic Polynucleotide
ggtctttgtactgatccc

SEQ ID NO: 8127 - DNA, 18 bp, Artificial Sequence
  Synthetic Polynucleotide
tcagtttgggacaatgcc

SEQ ID NO: 8128 - DNA, 18 bp, Artificial Sequence
  Synthetic Polynucleotide
gaatttgggtacttcgcg

SEQ ID NO: 8129 - DNA, 18 bp, Artificial Sequence
  Synthetic Polynucleotide
aacagggttcttcacgtc

SEQ ID NO: 8130 - DNA, 18 bp, Artificial Sequence
  Synthetic Polynucleotide
aagataggtatgcacaca

SEQ ID NO: 8131 - DNA, 18 bp, Artificial Sequence
  Synthetic Polynucleotide
tttctgcaagggctaagg

SEQ ID NO: 8132 - DNA, 18 bp, Artificial Sequence
  Synthetic Polynucleotide
aaaataggggtccgaatc

SEQ ID NO: 8133 - DNA, 18 bp, Artificial Sequence
  Synthetic Polynucleotide
aatggtcttaacagaggg

SEQ ID NO: 8134 - DNA, 18 bp, Artificial Sequence
  Synthetic Polynucleotide
tacttgttttagagaggc

SEQ ID NO: 8135 - DNA, 18 bp, Artificial Sequence
  Synthetic Polynucleotide
atcaaggctagaggggtg

SEQ ID NO: 8136 - DNA, 17 bp, Artificial Sequence
  Synthetic Polynucleotide
tgttttgggaacacagc

SEQ ID NO: 8137 - DNA, 18 bp, Artificial Sequence
  Synthetic Polynucleotide
atgttgtacaggctttta

SEQ ID NO: 8138 - DNA, 18 bp, Artificial Sequence
  Synthetic Polynucleotide
tcatcatcactagaggta

SEQ ID NO: 8139 - DNA, 17 bp, Artificial Sequence
  Synthetic Polynucleotide
atggggagagaaaggta

SEQ ID NO: 8140 - DNA, 18 bp, Artificial Sequence
  Synthetic Polynucleotide
ttagtctatcaggcgtct

SEQ ID NO: 8141 - DNA, 18 bp, Artificial Sequence
  Synthetic Polynucleotide
tgcaatgttggttaggtt

SEQ ID NO: 8142 - DNA, 18 bp, Artificial Sequence
  Synthetic Polynucleotide
tcactactttagaggtcc

SEQ ID NO: 8143 - DNA, 18 bp, Artificial Sequence
  Synthetic Polynucleotide
ggttgggatttaggatgg

SEQ ID NO: 8144 - DNA, 17 bp, Artificial Sequence
  Synthetic Polynucleotide
gtaggttgagggtcata

SEQ ID NO: 8145 - DNA, 17 bp, Artificial Sequence
  Synthetic Polynucleotide
aacaagctcagagaggg

SEQ ID NO: 8146 - DNA, 18 bp, Artificial Sequence
  Synthetic Polynucleotide
aaggttgacagaggatag

SEQ ID NO: 8147 - DNA, 18 bp, Artificial Sequence
  Synthetic Polynucleotide
catgttgtttggaaggtg

SEQ ID NO: 8148 - DNA, 18 bp, Artificial Sequence
  Synthetic Polynucleotide
ctgttgatcttgagggca

SEQ ID NO: 8149 - DNA, 18 bp, Artificial Sequence
  Synthetic Polynucleotide
ccatacttgacatgggtc

SEQ ID NO: 8150 - DNA, 18 bp, Artificial Sequence
  Synthetic Polynucleotide
ctttatgttgtgtagggc

SEQ ID NO: 8151 - DNA, 18 bp, Artificial Sequence
  Synthetic Polynucleotide
caagctaatgctcttctc

SEQ ID NO: 8152 - DNA, 17 bp, Artificial Sequence
  Synthetic Polynucleotide
tggggacatttacttgg

SEQ ID NO: 8153 - DNA, 18 bp, Artificial Sequence
  Synthetic Polynucleotide
gctggttgataaggaatg

SEQ ID NO: 8154 - DNA, 18 bp, Artificial Sequence
  Synthetic Polynucleotide
aggtaagggacaggcttc

SEQ ID NO: 8155 - DNA, 17 bp, Artificial Sequence
  Synthetic Polynucleotide
tggtggggaattttgtt

SEQ ID NO: 8156 - DNA, 17 bp, Artificial Sequence
  Synthetic Polynucleotide
cttggttgacaatggtc

SEQ ID NO: 8157 - DNA, 17 bp, Artificial Sequence
  Synthetic Polynucleotide
tgggtgtttgggtctta

SEQ ID NO: 8158 - DNA, 18 bp, Artificial Sequence
  Synthetic Polynucleotide
aaaattttggggtacagc

SEQ ID NO: 8159 - DNA, 18 bp, Artificial Sequence
  Synthetic Polynucleotide
gccattttctaggagaca

SEQ ID NO: 8160 - DNA, 18 bp, Artificial Sequence
  Synthetic Polynucleotide
tggattgaagggaactag

SEQ ID NO: 8161 - DNA, 17 bp, Artificial Sequence
  Synthetic Polynucleotide
ctcaggagagaacttgg

SEQ ID NO: 8162 - DNA, 18 bp, Artificial Sequence
  Synthetic Polynucleotide
tcatacaggctagagtga

SEQ ID NO: 8163 - DNA, 17 bp, Artificial Sequence
  Synthetic Polynucleotide
ttccgaatcgtggtcaa

SEQ ID NO: 8164 - DNA, 17 bp, Artificial Sequence
  Synthetic Polynucleotide
ggttggcttacttgagt

SEQ ID NO: 8165 - DNA, 18 bp, Artificial Sequence
  Synthetic Polynucleotide
ccgggatgtttatacaga

SEQ ID NO: 8166 - DNA, 18 bp, Artificial Sequence
  Synthetic Polynucleotide
cctttagggttagtggac

SEQ ID NO: 8167 - DNA, 18 bp, Artificial Sequence
  Synthetic Polynucleotide
ttgatgcaatgtaaggcc

SEQ ID NO: 8168 - DNA, 18 bp, Artificial Sequence
  Synthetic Polynucleotide
ccagtttgggacaatgcc

SEQ ID NO: 8169 - DNA, 17 bp, Artificial Sequence
  Synthetic Polynucleotide
ggctcagggtttactaa

SEQ ID NO: 8170 - DNA, 18 bp, Artificial Sequence
  Synthetic Polynucleotide
ggaaaagtgggttattcc

SEQ ID NO: 8171 - DNA, 17 bp, Artificial Sequence
  Synthetic Polynucleotide
ttcggtgtagtttccac

SEQ ID NO: 8172 - DNA, 18 bp, Artificial Sequence
  Synthetic Polynucleotide
gattcttaacaatgggcc

SEQ ID NO: 8173 - DNA, 18 bp, Artificial Sequence
  Synthetic Polynucleotide
cgccctaattgaataggt

SEQ ID NO: 8174 - DNA, 17 bp, Artificial Sequence
  Synthetic Polynucleotide
ggccagccagtcaatca

SEQ ID NO: 8175 - DNA, 18 bp, Artificial Sequence
  Synthetic Polynucleotide
gagatgtcacaaacgtag

SEQ ID NO: 8176 - DNA, 18 bp, Artificial Sequence
  Synthetic Polynucleotide
gatgctaggttagccatt

SEQ ID NO: 8177 - DNA, 17 bp, Artificial Sequence
  Synthetic Polynucleotide
gttggaggaagttgtga

SEQ ID NO: 8178 - DNA, 18 bp, Artificial Sequence
  Synthetic Polynucleotide
cctttaaccatgtctggg

SEQ ID NO: 8179 - DNA, 17 bp, Artificial Sequence
  Synthetic Polynucleotide
gagccacctttgtcagg

SEQ ID NO: 8180 - DNA, 18 bp, Artificial Sequence
  Synthetic Polynucleotide
cggtttgggtcaaaagtt

SEQ ID NO: 8181 - DNA, 18 bp, Artificial Sequence
  Synthetic Polynucleotide
gatgcgagatgcaagagg

SEQ ID NO: 8182 - DNA, 17 bp, Artificial Sequence
  Synthetic Polynucleotide
cgtgcttattggtatgc

SEQ ID NO: 8183 - DNA, 17 bp, Artificial Sequence
  Synthetic Polynucleotide
taacacgggaaagatga

SEQ ID NO: 8184 - DNA, 17 bp, Artificial Sequence
  Synthetic Polynucleotide
tatcaccatcacagcca

SEQ ID NO: 8185 - DNA, 17 bp, Artificial Sequence
  Synthetic Polynucleotide
gaagacgaacatcacga

SEQ ID NO: 8186 - DNA, 18 bp, Artificial Sequence
  Synthetic Polynucleotide
ccagtcgctcgatacgtt

SEQ ID NO: 8187 - DNA, 18 bp, Artificial Sequence
  Synthetic Polynucleotide
ccgccgctctcatacact

SEQ ID NO: 8188 - DNA, 17 bp, Artificial Sequence
  Synthetic Polynucleotide
tacactacgaaaaccgt

SEQ ID NO: 8189 - DNA, 17 bp, Artificial Sequence
  Synthetic Polynucleotide
ggattccgtttccacca

SEQ ID NO: 8190 - DNA, 18 bp, Artificial Sequence
  Synthetic Polynucleotide
gctgatcgaccatacctg

SEQ ID NO: 8191 - DNA, 17 bp, Artificial Sequence
  Synthetic Polynucleotide
ggttttggtcctgtgac

SEQ ID NO: 8192 - DNA, 17 bp, Artificial Sequence
  Synthetic Polynucleotide
cacagaagagcaactcc

SEQ ID NO: 8193 - DNA, 17 bp, Artificial Sequence
  Synthetic Polynucleotide
ctggcggggttggtggt

SEQ ID NO: 8194 - DNA, 17 bp, Artificial Sequence
  Synthetic Polynucleotide
accttggctcgcttttc

SEQ ID NO: 8195 - DNA, 18 bp, Artificial Sequence
  Synthetic Polynucleotide
caccataggggtctacga

SEQ ID NO: 8196 - DNA, 18 bp, Artificial Sequence
  Synthetic Polynucleotide
agatcatgtggtcagtgg

SEQ ID NO: 8197 - DNA, 18 bp, Artificial Sequence
  Synthetic Polynucleotide
gtgcaacgatatcctgaa

SEQ ID NO: 8198 - DNA, 17 bp, Artificial Sequence
  Synthetic Polynucleotide
catccagagaagagcat

SEQ ID NO: 8199 - DNA, 17 bp, Artificial Sequence
  Synthetic Polynucleotide
agcctgatttgaagggg

SEQ ID NO: 8200 - DNA, 18 bp, Artificial Sequence
  Synthetic Polynucleotide
catgtcaacagtttccac

SEQ ID NO: 8201 - DNA, 18 bp, Artificial Sequence
  Synthetic Polynucleotide
ctctgagattgtcaacga

SEQ ID NO: 8202 - DNA, 18 bp, Artificial Sequence
  Synthetic Polynucleotide
tgcttggtgtccattttg

SEQ ID NO: 8203 - DNA, 17 bp, Artificial Sequence
  Synthetic Polynucleotide
tgggcttgtagaagttc

SEQ ID NO: 8204 - DNA, 17 bp, Artificial Sequence
  Synthetic Polynucleotide
agggaaacttggacccg

SEQ ID NO: 8205 - DNA, 17 bp, Artificial Sequence
  Synthetic Polynucleotide
ccgcacaccatttcttc

SEQ ID NO: 8206 - DNA, 17 bp, Artificial Sequence
  Synthetic Polynucleotide
gccaacgtgcaatgttt

SEQ ID NO: 8207 - DNA, 17 bp, Artificial Sequence
  Synthetic Polynucleotide
tatgcaggaccagtgta

SEQ ID NO: 8208 - DNA, 18 bp, Artificial Sequence
  Synthetic Polynucleotide
ttcctcacgaagtcattc

SEQ ID NO: 8209 - DNA, 17 bp, Artificial Sequence
  Synthetic Polynucleotide
tttgacgaaagcagcag

SEQ ID NO: 8210 - DNA, 17 bp, Artificial Sequence
  Synthetic Polynucleotide
ttcttgtcgtacaccag

SEQ ID NO: 8211 - DNA, 17 bp, Artificial Sequence
  Synthetic Polynucleotide
cgaatccgtgtcgccgt

SEQ ID NO: 8212 - DNA, 17 bp, Artificial Sequence
  Synthetic Polynucleotide
aaaccgctcgccaacta

SEQ ID NO: 8213 - DNA, 18 bp, Artificial Sequence
  Synthetic Polynucleotide
tatgttaatcgccatgtt

SEQ ID NO: 8214 - DNA, 18 bp, Artificial Sequence
  Synthetic Polynucleotide
acgcatacgatatgtcaa

SEQ ID NO: 8215 - DNA, 18 bp, Artificial Sequence
  Synthetic Polynucleotide
gcaaactccttgatcttg

SEQ ID NO: 8216 - DNA, 18 bp, Artificial Sequence
  Synthetic Polynucleotide
ccagacacaatgaagctg

SEQ ID NO: 8217 - DNA, 17 bp, Artificial Sequence
  Synthetic Polynucleotide
ccgttttccttcttgtc

SEQ ID NO: 8218 - DNA, 18 bp, Artificial Sequence
  Synthetic Polynucleotide
ccgtgttgcaaatttcaa

SEQ ID NO: 8219 - DNA, 17 bp, Artificial Sequence
  Synthetic Polynucleotide
ccgtcgtactgtttgaa

SEQ ID NO: 8220 - DNA, 17 bp, Artificial Sequence
  Synthetic Polynucleotide
tcgttcaaaccgatcac

SEQ ID NO: 8221 - DNA, 18 bp, Artificial Sequence
  Synthetic Polynucleotide
ttgtctccgtcgcaatcg

SEQ ID NO: 8222 - DNA, 17 bp, Artificial Sequence
  Synthetic Polynucleotide
cgttttacgccaacgtg

SEQ ID NO: 8223 - DNA, 18 bp, Artificial Sequence
  Synthetic Polynucleotide
tgtgaaaactctcaccgg

SEQ ID NO: 8224 - DNA, 18 bp, Artificial Sequence
  Synthetic Polynucleotide
cgttcacaggctcaagat

SEQ ID NO: 8225 - DNA, 18 bp, Artificial Sequence
  Synthetic Polynucleotide
caacaaatgccaaagcta

SEQ ID NO: 8226 - DNA, 18 bp, Artificial Sequence
  Synthetic Polynucleotide
ttgcatctgtactcgatt

SEQ ID NO: 8227 - DNA, 17 bp, Artificial Sequence
  Synthetic Polynucleotide
ggaaactcccagtcgat

SEQ ID NO: 8228 - DNA, 17 bp, Artificial Sequence
  Synthetic Polynucleotide
tcccgtccccaacctta

SEQ ID NO: 8229 - DNA, 18 bp, Artificial Sequence
  Synthetic Polynucleotide
tcgtccatctaacattct

SEQ ID NO: 8230 - DNA, 18 bp, Artificial Sequence
  Synthetic Polynucleotide
tgcaaactaagcatcctt

SEQ ID NO: 8231 - DNA, 18 bp, Artificial Sequence
  Synthetic Polynucleotide
ctctcctccgcactacag

SEQ ID NO: 8232 - DNA, 18 bp, Artificial Sequence
  Synthetic Polynucleotide
cgtttaatgagaaccacg

SEQ ID NO: 8233 - DNA, 17 bp, Artificial Sequence
  Synthetic Polynucleotide
gtacgcatccaccactt

SEQ ID NO: 8234 - DNA, 18 bp, Artificial Sequence
  Synthetic Polynucleotide
ggccagatttaggaccag

SEQ ID NO: 8235 - DNA, 18 bp, Artificial Sequence
  Synthetic Polynucleotide
tctagtcgaatcaatcgc

SEQ ID NO: 8236 - DNA, 18 bp, Artificial Sequence
  Synthetic Polynucleotide
tcagccaaaggtaaatct

SEQ ID NO: 8237 - DNA, 18 bp, Artificial Sequence
  Synthetic Polynucleotide
accacaaaccatccgcaa

SEQ ID NO: 8238 - DNA, 17 bp, Artificial Sequence
  Synthetic Polynucleotide
acgccaacgaaatcaaa

SEQ ID NO: 8239 - DNA, 18 bp, Artificial Sequence
  Synthetic Polynucleotide
ttaaacccgccagcaatt

SEQ ID NO: 8240 - DNA, 18 bp, Artificial Sequence
  Synthetic Polynucleotide
attgttcaccagttgttc

SEQ ID NO: 8241 - DNA, 17 bp, Artificial Sequence
  Synthetic Polynucleotide
agccgacgaatcataca

SEQ ID NO: 8242 - DNA, 18 bp, Artificial Sequence
  Synthetic Polynucleotide
tcatacctcatattgggg

SEQ ID NO: 8243 - DNA, 17 bp, Artificial Sequence
  Synthetic Polynucleotide
gccttatgccaaaccag

SEQ ID NO: 8244 - DNA, 18 bp, Artificial Sequence
  Synthetic Polynucleotide
aagaggcactaaaagtga

SEQ ID NO: 8245 - DNA, 18 bp, Artificial Sequence
  Synthetic Polynucleotide
ggctaggcgtctgatttt

SEQ ID NO: 8246 - DNA, 18 bp, Artificial Sequence
  Synthetic Polynucleotide
ctaccagtgcagaaagca

SEQ ID NO: 8247 - DNA, 17 bp, Artificial Sequence
  Synthetic Polynucleotide
cccacagctcaggtacc

SEQ ID NO: 8248 - DNA, 17 bp, Artificial Sequence
  Synthetic Polynucleotide
cagctactcaggacagc

SEQ ID NO: 8249 - DNA, 18 bp, Artificial Sequence
  Synthetic Polynucleotide
tagtctagtggtttgtta

SEQ ID NO: 8250 - DNA, 17 bp, Artificial Sequence
  Synthetic Polynucleotide
aatgaggattgctcgga

SEQ ID NO: 8251 - DNA, 17 bp, Artificial Sequence
  Synthetic Polynucleotide
ggccaggggtattctct

SEQ ID NO: 8252 - DNA, 18 bp, Artificial Sequence
  Synthetic Polynucleotide
cacagtacatggagggaa

SEQ ID NO: 8253 - DNA, 18 bp, Artificial Sequence
  Synthetic Polynucleotide
atcagctcgaagttgctc

SEQ ID NO: 8254 - DNA, 18 bp, Artificial Sequence
  Synthetic Polynucleotide
ttgtgattccaaccagcg

SEQ ID NO: 8255 - DNA, 18 bp, Artificial Sequence
  Synthetic Polynucleotide
ggtcagggagtatttgat

SEQ ID NO: 8256 - DNA, 18 bp, Artificial Sequence
  Synthetic Polynucleotide
tgagtgacgttttcaata

SEQ ID NO: 8257 - DNA, 17 bp, Artificial Sequence
  Synthetic Polynucleotide
tgccagtatgttcgtca

SEQ ID NO: 8258 - DNA, 18 bp, Artificial Sequence
  Synthetic Polynucleotide
aaaacaaggaacatctgg

SEQ ID NO: 8259 - DNA, 18 bp, Artificial Sequence
  Synthetic Polynucleotide
tacaaggctaagtatgcc

SEQ ID NO: 8260 - DNA, 18 bp, Artificial Sequence
  Synthetic Polynucleotide
ctacttttcccgaaagga

SEQ ID NO: 8261 - DNA, 18 bp, Artificial Sequence
  Synthetic Polynucleotide
agtgtagcagtctcacca

SEQ ID NO: 8262 - DNA, 18 bp, Artificial Sequence
  Synthetic Polynucleotide
attgttagaccagtcacg

SEQ ID NO: 8263 - DNA, 18 bp, Artificial Sequence
  Synthetic Polynucleotide
gagaaaccgaagaaaaga

SEQ ID NO: 8264 - DNA, 17 bp, Artificial Sequence
  Synthetic Polynucleotide
taatcgtcgttgagacg

SEQ ID NO: 8265 - DNA, 18 bp, Artificial Sequence
  Synthetic Polynucleotide
tctcctatggaaaccctc

SEQ ID NO: 8266 - DNA, 17 bp, Artificial Sequence
  Synthetic Polynucleotide
actcctggtgattgtga

SEQ ID NO: 8267 - DNA, 17 bp, Artificial Sequence
  Synthetic Polynucleotide
gctatgcaagcccatgc

SEQ ID NO: 8268 - DNA, 17 bp, Artificial Sequence
  Synthetic Polynucleotide
tgacacgcagacctctt

SEQ ID NO: 8269 - DNA, 18 bp, Artificial Sequence
  Synthetic Polynucleotide
tgaaactagcacgttgtg

SEQ ID NO: 8270 - DNA, 18 bp, Artificial Sequence
  Synthetic Polynucleotide
cggctaaaatggtcagtc

SEQ ID NO: 8271 - DNA, 18 bp, Artificial Sequence
  Synthetic Polynucleotide
atcttcacgcaacatcta

SEQ ID NO: 8272 - DNA, 18 bp, Artificial Sequence
  Synthetic Polynucleotide
atggttcgactctctcag

SEQ ID NO: 8273 - DNA, 17 bp, Artificial Sequence
  Synthetic Polynucleotide
ctgcactctgaaggtat

SEQ ID NO: 8274 - DNA, 18 bp, Artificial Sequence
  Synthetic Polynucleotide
ggcatctaaactctctcc

SEQ ID NO: 8275 - DNA, 18 bp, Artificial Sequence
  Synthetic Polynucleotide
tggatgcttatacatgct

SEQ ID NO: 8276 - DNA, 18 bp, Artificial Sequence
  Synthetic Polynucleotide
cgaaaactgaattggcat

SEQ ID NO: 8277 - DNA, 18 bp, Artificial Sequence
  Synthetic Polynucleotide
ttaagttggacaaggtcc

SEQ ID NO: 8278 - DNA, 17 bp, Artificial Sequence
  Synthetic Polynucleotide
ctggattggtgaactcc

SEQ ID NO: 8279 - DNA, 17 bp, Artificial Sequence
  Synthetic Polynucleotide
tatttccgagattcccg

SEQ ID NO: 8280 - DNA, 17 bp, Artificial Sequence
  Synthetic Polynucleotide
aatctctctccctgaga

SEQ ID NO: 8281 - DNA, 17 bp, Artificial Sequence
  Synthetic Polynucleotide
catctttgctgctccgg

SEQ ID NO: 8282 - DNA, 18 bp, Artificial Sequence
  Synthetic Polynucleotide
ctgaaaggaaactggcat

SEQ ID NO: 8283 - DNA, 18 bp, Artificial Sequence
  Synthetic Polynucleotide
ttgactaattggtggtgt

SEQ ID NO: 8284 - DNA, 18 bp, Artificial Sequence
  Synthetic Polynucleotide
acagaagctcaagtagtg

SEQ ID NO: 8285 - DNA, 18 bp, Artificial Sequence
  Synthetic Polynucleotide
gaatttcgattcccacta

SEQ ID NO: 8286 - DNA, 17 bp, Artificial Sequence
  Synthetic Polynucleotide
gtctcccctaagagact

SEQ ID NO: 8287 - DNA, 18 bp, Artificial Sequence
  Synthetic Polynucleotide
taaagtgaatgctgctat

SEQ ID NO: 8288 - DNA, 18 bp, Artificial Sequence
  Synthetic Polynucleotide
atcgaagctcctgtacac

SEQ ID NO: 8289 - DNA, 17 bp, Artificial Sequence
  Synthetic Polynucleotide
cgcactcctagtgaatc

SEQ ID NO: 8290 - DNA, 17 bp, Artificial Sequence
  Synthetic Polynucleotide
ttgtgattgtgaactgc

SEQ ID NO: 8291 - DNA, 18 bp, Artificial Sequence
  Synthetic Polynucleotide
cggtgatgaactttatgg

SEQ ID NO: 8292 - DNA, 17 bp, Artificial Sequence
  Synthetic Polynucleotide
gacttctctccccgttt

SEQ ID NO: 8293 - DNA, 17 bp, Artificial Sequence
  Synthetic Polynucleotide
ggtcaagctatcatggc

SEQ ID NO: 8294 - DNA, 18 bp, Artificial Sequence
  Synthetic Polynucleotide
acctggatgacgcaacat

SEQ ID NO: 8295 - DNA, 18 bp, Artificial Sequence
  Synthetic Polynucleotide
ttgcttttggtgatacta

SEQ ID NO: 8296 - DNA, 18 bp, Artificial Sequence
  Synthetic Polynucleotide
ctaggacacgcctaagga

SEQ ID NO: 8297 - DNA, 18 bp, Artificial Sequence
  Synthetic Polynucleotide
gtttaggttggttttgga

SEQ ID NO: 8298 - DNA, 18 bp, Artificial Sequence
  Synthetic Polynucleotide
caagacactcgttagagt

SEQ ID NO: 8299 - DNA, 18 bp, Artificial Sequence
  Synthetic Polynucleotide
tcccctaatgtggatttt

SEQ ID NO: 8300 - DNA, 17 bp, Artificial Sequence
  Synthetic Polynucleotide
cctgtacgcctctggta

SEQ ID NO: 8301 - DNA, 18 bp, Artificial Sequence
  Synthetic Polynucleotide
cgatggacaagtatcgac

SEQ ID NO: 8302 - DNA, 18 bp, Artificial Sequence
  Synthetic Polynucleotide
ctggaatggtaagatgga

SEQ ID NO: 8303 - DNA, 18 bp, Artificial Sequence
  Synthetic Polynucleotide
aacgcctctgttacaatt

SEQ ID NO: 8304 - DNA, 18 bp, Artificial Sequence
  Synthetic Polynucleotide
agtcgctatggactgaat

SEQ ID NO: 8305 - DNA, 17 bp, Artificial Sequence
  Synthetic Polynucleotide
tcaaaggacaaatggta

SEQ ID NO: 8306 - DNA, 17 bp, Artificial Sequence
  Synthetic Polynucleotide
atcgatttaaccccgag

SEQ ID NO: 8307 - DNA, 17 bp, Artificial Sequence
  Synthetic Polynucleotide
tattccgaattggacag

SEQ ID NO: 8308 - DNA, 18 bp, Artificial Sequence
  Synthetic Polynucleotide
tatggtatgtctccgcaa

SEQ ID NO: 8309 - DNA, 17 bp, Artificial Sequence
  Synthetic Polynucleotide
gaagatctccgaagtcg

SEQ ID NO: 8310 - DNA, 18 bp, Artificial Sequence
  Synthetic Polynucleotide
gacactcatgtttggtac

SEQ ID NO: 8311 - DNA, 18 bp, Artificial Sequence
  Synthetic Polynucleotide
agattgctgataaaccgg

SEQ ID NO: 8312 - DNA, 18 bp, Artificial Sequence
  Synthetic Polynucleotide
acgtatattgtggtcgct

SEQ ID NO: 8313 - DNA, 17 bp, Artificial Sequence
  Synthetic Polynucleotide
tgatggacccgaatatg

SEQ ID NO: 8314 - DNA, 18 bp, Artificial Sequence
  Synthetic Polynucleotide
aattgttcctcccaaata

SEQ ID NO: 8315 - DNA, 18 bp, Artificial Sequence
  Synthetic Polynucleotide
tctcgtatatgactcctc

SEQ ID NO: 8316 - DNA, 18 bp, Artificial Sequence
  Synthetic Polynucleotide
tgttggctcttgataagt

SEQ ID NO: 8317 - DNA, 18 bp, Artificial Sequence
  Synthetic Polynucleotide
tcccagaatgaactaaga

SEQ ID NO: 8318 - DNA, 17 bp, Artificial Sequence
  Synthetic Polynucleotide
tatcccgcagatggttc

SEQ ID NO: 8319 - DNA, 17 bp, Artificial Sequence
  Synthetic Polynucleotide
taaacacttcccctcaa

SEQ ID NO: 8320 - DNA, 18 bp, Artificial Sequence
  Synthetic Polynucleotide
ttcagaaggaaacccgat

SEQ ID NO: 8321 - DNA, 17 bp, Artificial Sequence
  Synthetic Polynucleotide
accgctggtgaaatgac

SEQ ID NO: 8322 - DNA, 17 bp, Artificial Sequence
  Synthetic Polynucleotide
ttcccgttattcatgcg

SEQ ID NO: 8323 - DNA, 18 bp, Artificial Sequence
  Synthetic Polynucleotide
tccatgtctccgtaacaa

SEQ ID NO: 8324 - DNA, 17 bp, Artificial Sequence
  Synthetic Polynucleotide
ggtcaatggttgtaccc

SEQ ID NO: 8325 - DNA, 18 bp, Artificial Sequence
  Synthetic Polynucleotide
acaatggttagtagctga

SEQ ID NO: 8326 - DNA, 18 bp, Artificial Sequence
  Synthetic Polynucleotide
gaagatcctgtgcctggt

SEQ ID NO: 8327 - DNA, 18 bp, Artificial Sequence
  Synthetic Polynucleotide
ctttccgctctttcttac

SEQ ID NO: 8328 - DNA, 17 bp, Artificial Sequence
  Synthetic Polynucleotide
tggtggctgttccgaat

SEQ ID NO: 8329 - DNA, 18 bp, Artificial Sequence
  Synthetic Polynucleotide
tctataagagtacccgtc

SEQ ID NO: 8330 - DNA, 17 bp, Artificial Sequence
  Synthetic Polynucleotide
cccctggattgagttac

SEQ ID NO: 8331 - DNA, 17 bp, Artificial Sequence
  Synthetic Polynucleotide
tattcaataccccgcta

SEQ ID NO: 8332 - DNA, 18 bp, Artificial Sequence
  Synthetic Polynucleotide
cgtcgttaagtttgaaca

SEQ ID NO: 8333 - DNA, 17 bp, Artificial Sequence
  Synthetic Polynucleotide
ccgcctgatccccatgt

SEQ ID NO: 8334 - DNA, 17 bp, Artificial Sequence
  Synthetic Polynucleotide
cccctcttttaaggctc

SEQ ID NO: 8335 - DNA, 18 bp, Artificial Sequence
  Synthetic Polynucleotide
cagtcttaatgttcgctt

SEQ ID NO: 8336 - DNA, 17 bp, Artificial Sequence
  Synthetic Polynucleotide
tgattccgctctcatgc

SEQ ID NO: 8337 - DNA, 18 bp, Artificial Sequence
  Synthetic Polynucleotide
agctatggcccgttctat

SEQ ID NO: 8338 - DNA, 18 bp, Artificial Sequence
  Synthetic Polynucleotide
ttcccactcatgcttatt

SEQ ID NO: 8339 - DNA, 18 bp, Artificial Sequence
  Synthetic Polynucleotide
attcaatggtgaatccgt

SEQ ID NO: 8340 - DNA, 18 bp, Artificial Sequence
  Synthetic Polynucleotide
agcaagattatccgctaa

SEQ ID NO: 8341 - DNA, 17 bp, Artificial Sequence
  Synthetic Polynucleotide
ccctcgctatcttcctc

SEQ ID NO: 8342 - DNA, 17 bp, Artificial Sequence
  Synthetic Polynucleotide
gcccgattgtagtctgt

SEQ ID NO: 8343 - DNA, 18 bp, Artificial Sequence
  Synthetic Polynucleotide
tcgttattccgtttatga

SEQ ID NO: 8344 - DNA, 17 bp, Artificial Sequence
  Synthetic Polynucleotide
gccgaatggtatactga

SEQ ID NO: 8345 - DNA, 18 bp, Artificial Sequence
  Synthetic Polynucleotide
ccaaagtcttcttcccag

SEQ ID NO: 8346 - DNA, 17 bp, Artificial Sequence
  Synthetic Polynucleotide
gccctcattttcaagtg

SEQ ID NO: 8347 - DNA, 17 bp, Artificial Sequence
  Synthetic Polynucleotide
tagtgattcctcctcta

SEQ ID NO: 8348 - DNA, 17 bp, Artificial Sequence
  Synthetic Polynucleotide
gtctaccgtcgttatga

SEQ ID NO: 8349 - DNA, 17 bp, Artificial Sequence
  Synthetic Polynucleotide
cttaaacacgctttccg

SEQ ID NO: 8350 - DNA, 18 bp, Artificial Sequence
  Synthetic Polynucleotide
ctcccgtatccgaatttc

SEQ ID NO: 8351 - DNA, 17 bp, Artificial Sequence
  Synthetic Polynucleotide
tgtggattttccgcaac

SEQ ID NO: 8352 - DNA, 18 bp, Artificial Sequence
  Synthetic Polynucleotide
atcctgatggtaaggttc

SEQ ID NO: 8353 - DNA, 18 bp, Artificial Sequence
  Synthetic Polynucleotide
tatcccctaatcgtttga

SEQ ID NO: 8354 - DNA, 17 bp, Artificial Sequence
  Synthetic Polynucleotide
tcctcgtttatgtaccg

SEQ ID NO: 8355 - DNA, 18 bp, Artificial Sequence
  Synthetic Polynucleotide
cacttcctccccagatat

SEQ ID NO: 8356 - DNA, 17 bp, Artificial Sequence
  Synthetic Polynucleotide
catcgttggattgatgc

SEQ ID NO: 8357 - DNA, 17 bp, Artificial Sequence
  Synthetic Polynucleotide
taagatccgcctcaagg

SEQ ID NO: 8358 - DNA, 18 bp, Artificial Sequence
  Synthetic Polynucleotide
atgttcctgagttggctg

SEQ ID NO: 8359 - DNA, 17 bp, Artificial Sequence
  Synthetic Polynucleotide
aacttctcgttgtaggc

SEQ ID NO: 8360 - DNA, 17 bp, Artificial Sequence
  Synthetic Polynucleotide
tactatggctctttcga

SEQ ID NO: 8361 - DNA, 18 bp, Artificial Sequence
  Synthetic Polynucleotide
tcgaatgtacctgattgc

SEQ ID NO: 8362 - DNA, 17 bp, Artificial Sequence
  Synthetic Polynucleotide
gacgttccctctaaagg

SEQ ID NO: 8363 - DNA, 18 bp, Artificial Sequence
  Synthetic Polynucleotide
actccctctccctcgatt

SEQ ID NO: 8364 - DNA, 18 bp, Artificial Sequence
  Synthetic Polynucleotide
agattttatgcaactggc

SEQ ID NO: 8365 - DNA, 17 bp, Artificial Sequence
  Synthetic Polynucleotide
aattgaacacgcaagta

SEQ ID NO: 8366 - DNA, 18 bp, Artificial Sequence
  Synthetic Polynucleotide
gatggatatgtcacgtta

SEQ ID NO: 8367 - DNA, 17 bp, Artificial Sequence
  Synthetic Polynucleotide
gtcgtccctgtgatttg

SEQ ID NO: 8368 - DNA, 17 bp, Artificial Sequence
  Synthetic Polynucleotide
gggatggttcttagacg

SEQ ID NO: 8369 - DNA, 18 bp, Artificial Sequence
  Synthetic Polynucleotide
tccgtaatttccgataac

SEQ ID NO: 8370 - DNA, 17 bp, Artificial Sequence
  Synthetic Polynucleotide
agagtatgttcccgagt

SEQ ID NO: 8371 - DNA, 18 bp, Artificial Sequence
  Synthetic Polynucleotide
acatcaaggacatttcca

SEQ ID NO: 8372 - DNA, 18 bp, Artificial Sequence
  Synthetic Polynucleotide
tagtagtagactccttga

SEQ ID NO: 8373 - DNA, 18 bp, Artificial Sequence
  Synthetic Polynucleotide
tacctcttattgcttcag

SEQ ID NO: 8374 - DNA, 17 bp, Artificial Sequence
  Synthetic Polynucleotide
tttgcttttcagcacag

SEQ ID NO: 8375 - DNA, 17 bp, Artificial Sequence
  Synthetic Polynucleotide
acttcgcagaccccttt

SEQ ID NO: 8376 - DNA, 17 bp, Artificial Sequence
  Synthetic Polynucleotide
actacattgacgggatg

SEQ ID NO: 8377 - DNA, 17 bp, Artificial Sequence
  Synthetic Polynucleotide
ttgcaaacctgttcata

SEQ ID NO: 8378 - DNA, 17 bp, Artificial Sequence
  Synthetic Polynucleotide
atcaggaccaaaatggc

SEQ ID NO: 8379 - DNA, 17 bp, Artificial Sequence
  Synthetic Polynucleotide
ctcacccagcagttgct

SEQ ID NO: 8380 - DNA, 18 bp, Artificial Sequence
  Synthetic Polynucleotide
gtcacaaacaaccaggat

SEQ ID NO: 8381 - DNA, 17 bp, Artificial Sequence
  Synthetic Polynucleotide
acaaagctccctagaga

SEQ ID NO: 8382 - DNA, 18 bp, Artificial Sequence
  Synthetic Polynucleotide
tttcttggcatccttctc

SEQ ID NO: 8383 - DNA, 17 bp, Artificial Sequence
  Synthetic Polynucleotide
cgcacagccctttaagt

SEQ ID NO: 8384 - DNA, 17 bp, Artificial Sequence
  Synthetic Polynucleotide
cacaccaagtccattct

SEQ ID NO: 8385 - DNA, 18 bp, Artificial Sequence
  Synthetic Polynucleotide
tcctgtaggttcatcaat

SEQ ID NO: 8386 - DNA, 18 bp, Artificial Sequence
  Synthetic Polynucleotide
gtagactccctaaagagc

SEQ ID NO: 8387 - DNA, 18 bp, Artificial Sequence
  Synthetic Polynucleotide
actaccaaaagaaacccc

SEQ ID NO: 8388 - DNA, 18 bp, Artificial Sequence
  Synthetic Polynucleotide
tctgccccactataccaa

SEQ ID NO: 8389 - DNA, 18 bp, Artificial Sequence
  Synthetic Polynucleotide
tgtcccctaccacccacc

SEQ ID NO: 8390 - DNA, 18 bp, Artificial Sequence
  Synthetic Polynucleotide
acaacgatcttaccatcc

SEQ ID NO: 8391 - DNA, 17 bp, Artificial Sequence
  Synthetic Polynucleotide
ctgacacacttgtttcc

SEQ ID NO: 8392 - DNA, 18 bp, Artificial Sequence
  Synthetic Polynucleotide
tagtagactccgcaagaa

SEQ ID NO: 8393 - DNA, 17 bp, Artificial Sequence
  Synthetic Polynucleotide
gaccccaccaaaagtaa

SEQ ID NO: 8394 - DNA, 17 bp, Artificial Sequence
  Synthetic Polynucleotide
gtcttcttcctcaacca

SEQ ID NO: 8395 - DNA, 18 bp, Artificial Sequence
  Synthetic Polynucleotide
tctcttctgccttcatgc

SEQ ID NO: 8396 - DNA, 17 bp, Artificial Sequence
  Synthetic Polynucleotide
tagactccctaaagagc

SEQ ID NO: 8397 - DNA, 17 bp, Artificial Sequence
  Synthetic Polynucleotide
tttgcattgacacggaa

SEQ ID NO: 8398 - DNA, 17 bp, Artificial Sequence
  Synthetic Polynucleotide
acgtgccgcttacgccc

SEQ ID NO: 8399 - DNA, 18 bp, Artificial Sequence
  Synthetic Polynucleotide
agcacttgtctttcagtt

SEQ ID NO: 8400 - DNA, 17 bp, Artificial Sequence
  Synthetic Polynucleotide
tctggagaatccattgg

SEQ ID NO: 8401 - DNA, 17 bp, Artificial Sequence
  Synthetic Polynucleotide
tcagccttcattgttga

SEQ ID NO: 8402 - DNA, 17 bp, Artificial Sequence
  Synthetic Polynucleotide
ggctacaaaaccagttg

SEQ ID NO: 8403 - DNA, 17 bp, Artificial Sequence
  Synthetic Polynucleotide
gtgcagccacatctttc

SEQ ID NO: 8404 - DNA, 18 bp, Artificial Sequence
  Synthetic Polynucleotide
cagatgtactctcctgtc

SEQ ID NO: 8405 - DNA, 17 bp, Artificial Sequence
  Synthetic Polynucleotide
ctgctcacaaactctct

SEQ ID NO: 8406 - DNA, 17 bp, Artificial Sequence
  Synthetic Polynucleotide
cccagtccattccactg

SEQ ID NO: 8407 - DNA, 17 bp, Artificial Sequence
  Synthetic Polynucleotide
cccagcttacagcataa

SEQ ID NO: 8408 - DNA, 18 bp, Artificial Sequence
  Synthetic Polynucleotide
tgcttcaatcagcatatg

SEQ ID NO: 8409 - DNA, 17 bp, Artificial Sequence
  Synthetic Polynucleotide
tgacccaccctctgagt

SEQ ID NO: 8410 - DNA, 17 bp, Artificial Sequence
  Synthetic Polynucleotide
acaatcatggcatccaa

SEQ ID NO: 8411 - DNA, 18 bp, Artificial Sequence
  Synthetic Polynucleotide
accaaattgactcacgaa

SEQ ID NO: 8412 - DNA, 18 bp, Artificial Sequence
  Synthetic Polynucleotide
cataccattgagcctttt

SEQ ID NO: 8413 - DNA, 18 bp, Artificial Sequence
  Synthetic Polynucleotide
tcctaaagttcattgcta

SEQ ID NO: 8414 - DNA, 18 bp, Artificial Sequence
  Synthetic Polynucleotide
ggacattcccatatctga

SEQ ID NO: 8415 - DNA, 18 bp, Artificial Sequence
  Synthetic Polynucleotide
cccagatgacgttaacaa

SEQ ID NO: 8416 - DNA, 18 bp, Artificial Sequence
  Synthetic Polynucleotide
ggcattccttttccataa

SEQ ID NO: 8417 - DNA, 17 bp, Artificial Sequence
  Synthetic Polynucleotide
ggataaactcgcagact

SEQ ID NO: 8418 - DNA, 18 bp, Artificial Sequence
  Synthetic Polynucleotide
tcaactttccacttgaca

SEQ ID NO: 8419 - DNA, 17 bp, Artificial Sequence
  Synthetic Polynucleotide
tgcacatcatcaacctg

SEQ ID NO: 8420 - DNA, 18 bp, Artificial Sequence
  Synthetic Polynucleotide
gtccatagaccatcgtcg

SEQ ID NO: 8421 - DNA, 17 bp, Artificial Sequence
  Synthetic Polynucleotide
taaatttgacccctgca

SEQ ID NO: 8422 - DNA, 17 bp, Artificial Sequence
  Synthetic Polynucleotide
tcttcttcctcaaccag

SEQ ID NO: 8423 - DNA, 18 bp, Artificial Sequence
  Synthetic Polynucleotide
tcactgtaatgttccata

SEQ ID NO: 8424 - DNA, 18 bp, Artificial Sequence
  Synthetic Polynucleotide
ctaagattgcttcccacc

SEQ ID NO: 8425 - DNA, 18 bp, Artificial Sequence
  Synthetic Polynucleotide
ctgtccccaaccacccac

SEQ ID NO: 8426 - DNA, 18 bp, Artificial Sequence
  Synthetic Polynucleotide
cttaccctccacagactc

SEQ ID NO: 8427 - DNA, 17 bp, Artificial Sequence
  Synthetic Polynucleotide
tagtacctgcctcaatc

SEQ ID NO: 8428 - DNA, 18 bp, Artificial Sequence
  Synthetic Polynucleotide
gatgttacaaccagcatc

SEQ ID NO: 8429 - DNA, 17 bp, Artificial Sequence
  Synthetic Polynucleotide
tggccgattcagaactg

SEQ ID NO: 8430 - DNA, 17 bp, Artificial Sequence
  Synthetic Polynucleotide
ctgtgttcttcacacct

SEQ ID NO: 8431 - DNA, 17 bp, Artificial Sequence
  Synthetic Polynucleotide
tgcattcagcatcaacg

SEQ ID NO: 8432 - DNA, 17 bp, Artificial Sequence
  Synthetic Polynucleotide
gcctatccttcctcaag

SEQ ID NO: 8433 - DNA, 17 bp, Artificial Sequence
  Synthetic Polynucleotide
tgcacactttcccaact

SEQ ID NO: 8434 - DNA, 17 bp, Artificial Sequence
  Synthetic Polynucleotide
taacaacaccagcattg

SEQ ID NO: 8435 - DNA, 17 bp, Artificial Sequence
  Synthetic Polynucleotide
atgtaccacaacggact

SEQ ID NO: 8436 - DNA, 18 bp, Artificial Sequence
  Synthetic Polynucleotide
ggacattcccatatctca

SEQ ID NO: 8437 - DNA, 18 bp, Artificial Sequence
  Synthetic Polynucleotide
ggctacaaaaccagttga

SEQ ID NO: 8438 - DNA, 17 bp, Artificial Sequence
  Synthetic Polynucleotide
accccaaccagtctcat

SEQ ID NO: 8439 - DNA, 18 bp, Artificial Sequence
  Synthetic Polynucleotide
cagctacaaaacccagca

SEQ ID NO: 8440 - DNA, 17 bp, Artificial Sequence
  Synthetic Polynucleotide
agtagtagactccgcaa

SEQ ID NO: 8441 - DNA, 17 bp, Artificial Sequence
  Synthetic Polynucleotide
tcacactcacatgttta

SEQ ID NO: 8442 - DNA, 18 bp, Artificial Sequence
  Synthetic Polynucleotide
ccaccttacctgttacac

SEQ ID NO: 8443 - DNA, 17 bp, Artificial Sequence
  Synthetic Polynucleotide
aattcttcacaacccca

SEQ ID NO: 8444 - DNA, 17 bp, Artificial Sequence
  Synthetic Polynucleotide
atctagcataccagcct

SEQ ID NO: 8445 - DNA, 17 bp, Artificial Sequence
  Synthetic Polynucleotide
acccacccacaacggat

SEQ ID NO: 8446 - DNA, 18 bp, Artificial Sequence
  Synthetic Polynucleotide
gtcaccatcatcaatctg

SEQ ID NO: 8447 - DNA, 17 bp, Artificial Sequence
  Synthetic Polynucleotide
tgcatttcctctcacct

SEQ ID NO: 8448 - DNA, 18 bp, Artificial Sequence
  Synthetic Polynucleotide
agcacaaatagacactcc

SEQ ID NO: 8449 - DNA, 17 bp, Artificial Sequence
  Synthetic Polynucleotide
gcttagcagcatcattc

SEQ ID NO: 8450 - DNA, 18 bp, Artificial Sequence
  Synthetic Polynucleotide
gctacaaatactgacgta

SEQ ID NO: 8451 - DNA, 17 bp, Artificial Sequence
  Synthetic Polynucleotide
tcaacttcagcagacac

SEQ ID NO: 8452 - DNA, 18 bp, Artificial Sequence
  Synthetic Polynucleotide
gtagactccgcaaaagaa

SEQ ID NO: 8453 - DNA, 18 bp, Artificial Sequence
  Synthetic Polynucleotide
ttgctttacaccatctcc

SEQ ID NO: 8454 - DNA, 18 bp, Artificial Sequence
  Synthetic Polynucleotide
agcctcataaagaagtcc

SEQ ID NO: 8455 - DNA, 17 bp, Artificial Sequence
  Synthetic Polynucleotide
ccgaccacactgttttc

SEQ ID NO: 8456 - DNA, 17 bp, Artificial Sequence
  Synthetic Polynucleotide
tagtagacaccgcaaga

SEQ ID NO: 8457 - DNA, 17 bp, Artificial Sequence
  Synthetic Polynucleotide
gtccccaaccacccacc

SEQ ID NO: 8458 - DNA, 17 bp, Artificial Sequence
  Synthetic Polynucleotide
ccctccaccgcctcagt

SEQ ID NO: 8459 - DNA, 18 bp, Artificial Sequence
  Synthetic Polynucleotide
tcgtaaactcttgtaccc

SEQ ID NO: 8460 - DNA, 18 bp, Artificial Sequence
  Synthetic Polynucleotide
ggtttagcataccatcca

SEQ ID NO: 8461 - DNA, 17 bp, Artificial Sequence
  Synthetic Polynucleotide
actgcctcctttcccca

SEQ ID NO: 8462 - DNA, 17 bp, Artificial Sequence
  Synthetic Polynucleotide
ggaatttcaagccctca

SEQ ID NO: 8463 - DNA, 18 bp, Artificial Sequence
  Synthetic Polynucleotide
gttttctggcatcagttc

SEQ ID NO: 8464 - DNA, 18 bp, Artificial Sequence
  Synthetic Polynucleotide
tagttgcatcacctaaaa

SEQ ID NO: 8465 - DNA, 17 bp, Artificial Sequence
  Synthetic Polynucleotide
acccaacccaaccccta

SEQ ID NO: 8466 - DNA, 17 bp, Artificial Sequence
  Synthetic Polynucleotide
atgccctcctacctgcc

SEQ ID NO: 8467 - DNA, 17 bp, Artificial Sequence
  Synthetic Polynucleotide
cctatcatacagctccg

SEQ ID NO: 8468 - DNA, 17 bp, Artificial Sequence
  Synthetic Polynucleotide
tttgcatcttcctcgtg

SEQ ID NO: 8469 - DNA, 17 bp, Artificial Sequence
  Synthetic Polynucleotide
ccccaaccagtctcata

SEQ ID NO: 8470 - DNA, 18 bp, Artificial Sequence
  Synthetic Polynucleotide
ctccctaccatcctctgc

SEQ ID NO: 8471 - DNA, 18 bp, Artificial Sequence
  Synthetic Polynucleotide
tgtgatctcttcagcctt

SEQ ID NO: 8472 - DNA, 17 bp, Artificial Sequence
  Synthetic Polynucleotide
tgaccacctcaaagaga

SEQ ID NO: 8473 - DNA, 17 bp, Artificial Sequence
  Synthetic Polynucleotide
tctttgcccattctacc

SEQ ID NO: 8474 - DNA, 18 bp, Artificial Sequence
  Synthetic Polynucleotide
tccttcatttcccatgtc

SEQ ID NO: 8475 - DNA, 17 bp, Artificial Sequence
  Synthetic Polynucleotide
gtcagaccaatcatgct

SEQ ID NO: 8476 - DNA, 18 bp, Artificial Sequence
  Synthetic Polynucleotide
gactccgagatagagaag

SEQ ID NO: 8477 - DNA, 17 bp, Artificial Sequence
  Synthetic Polynucleotide
tctggcattaacactct

SEQ ID NO: 8478 - DNA, 17 bp, Artificial Sequence
  Synthetic Polynucleotide
gcacctcatcactaggc

SEQ ID NO: 8479 - DNA, 18 bp, Artificial Sequence
  Synthetic Polynucleotide
gtcgaccatcatatccat

SEQ ID NO: 8480 - DNA, 18 bp, Artificial Sequence
  Synthetic Polynucleotide
cttcaagacacaaccact

SEQ ID NO: 8481 - DNA, 17 bp, Artificial Sequence
  Synthetic Polynucleotide
tcaactattcccctctc

SEQ ID NO: 8482 - DNA, 18 bp, Artificial Sequence
  Synthetic Polynucleotide
aaaatttcactcgcctca

SEQ ID NO: 8483 - DNA, 17 bp, Artificial Sequence
  Synthetic Polynucleotide
ccatatcatcacccagg

SEQ ID NO: 8484 - DNA, 18 bp, Artificial Sequence
  Synthetic Polynucleotide
ttctcatcaaaccctgcc

SEQ ID NO: 8485 - DNA, 18 bp, Artificial Sequence
  Synthetic Polynucleotide
gttgacatccattccatc

SEQ ID NO: 8486 - DNA, 17 bp, Artificial Sequence
  Synthetic Polynucleotide
tctcgctacgtttaacc

SEQ ID NO: 8487 - DNA, 17 bp, Artificial Sequence
  Synthetic Polynucleotide
tccttcctccacttgag

SEQ ID NO: 8488 - DNA, 17 bp, Artificial Sequence
  Synthetic Polynucleotide
cgtgccgcttacgccca

SEQ ID NO: 8489 - DNA, 17 bp, Artificial Sequence
  Synthetic Polynucleotide
ctgactctaaccagcaa

SEQ ID NO: 8490 - DNA, 17 bp, Artificial Sequence
  Synthetic Polynucleotide
tacccagcacaatcatg

SEQ ID NO: 8491 - DNA, 18 bp, Artificial Sequence
  Synthetic Polynucleotide
ggcttaccccattcaaaa

SEQ ID NO: 8492 - DNA, 17 bp, Artificial Sequence
  Synthetic Polynucleotide
gcctcctattgatccag

SEQ ID NO: 8493 - DNA, 18 bp, Artificial Sequence
  Synthetic Polynucleotide
tgcttttccacatttcag

SEQ ID NO: 8494 - DNA, 17 bp, Artificial Sequence
  Synthetic Polynucleotide
tttgctcaccattcaga

SEQ ID NO: 8495 - DNA, 17 bp, Artificial Sequence
  Synthetic Polynucleotide
atccctcaccttctgcc

SEQ ID NO: 8496 - DNA, 17 bp, Artificial Sequence
  Synthetic Polynucleotide
gcagacaaccaaagata

SEQ ID NO: 8497 - DNA, 18 bp, Artificial Sequence
  Synthetic Polynucleotide
actgcctctcttgactag

SEQ ID NO: 8498 - DNA, 18 bp, Artificial Sequence
  Synthetic Polynucleotide
tcaactttcaaaccaaca

SEQ ID NO: 8499 - DNA, 18 bp, Artificial Sequence
  Synthetic Polynucleotide
tgcagctccttattgaca

SEQ ID NO: 8500 - DNA, 18 bp, Artificial Sequence
  Synthetic Polynucleotide
tcaatcctttccatccag

SEQ ID NO: 8501 - DNA, 18 bp, Artificial Sequence
  Synthetic Polynucleotide
gccaacagcacaatcaac

SEQ ID NO: 8502 - DNA, 18 bp, Artificial Sequence
  Synthetic Polynucleotide
catcagcactcacataca

SEQ ID NO: 8503 - DNA, 18 bp, Artificial Sequence
  Synthetic Polynucleotide
cacagactaatccaaacg

SEQ ID NO: 8504 - DNA, 18 bp, Artificial Sequence
  Synthetic Polynucleotide
tctttcaccttagcatca

SEQ ID NO: 8505 - DNA, 18 bp, Artificial Sequence
  Synthetic Polynucleotide
gagaaacactatcatggc

SEQ ID NO: 8506 - DNA, 17 bp, Artificial Sequence
  Synthetic Polynucleotide
gtcttctagactctgcc

SEQ ID NO: 8507 - DNA, 17 bp, Artificial Sequence
  Synthetic Polynucleotide
gcagtcacttttcccaa

SEQ ID NO: 8508 - DNA, 17 bp, Artificial Sequence
  Synthetic Polynucleotide
atgtcacccattcacca

SEQ ID NO: 8509 - DNA, 18 bp, Artificial Sequence
  Synthetic Polynucleotide
gtattcacccctaagagc

SEQ ID NO: 8510 - DNA, 18 bp, Artificial Sequence
  Synthetic Polynucleotide
cagttgaattcccattga

SEQ ID NO: 8511 - DNA, 17 bp, Artificial Sequence
  Synthetic Polynucleotide
ggtgcccattcctacct

SEQ ID NO: 8512 - DNA, 18 bp, Artificial Sequence
  Synthetic Polynucleotide
caattgcattcacatcga

SEQ ID NO: 8513 - DNA, 17 bp, Artificial Sequence
  Synthetic Polynucleotide
aactcgcagactacaag

SEQ ID NO: 8514 - DNA, 18 bp, Artificial Sequence
  Synthetic Polynucleotide
accataccaaacccacat

SEQ ID NO: 8515 - DNA, 18 bp, Artificial Sequence
  Synthetic Polynucleotide
gcaagcccattattccat

SEQ ID NO: 8516 - DNA, 17 bp, Artificial Sequence
  Synthetic Polynucleotide
gtgcatcatccattgta

SEQ ID NO: 8517 - DNA, 18 bp, Artificial Sequence
  Synthetic Polynucleotide
tcaagctcacaaaagaaa

SEQ ID NO: 8518 - DNA, 18 bp, Artificial Sequence
  Synthetic Polynucleotide
ttttgaccccttactaga

SEQ ID NO: 8519 - DNA, 17 bp, Artificial Sequence
  Synthetic Polynucleotide
gcatcatttctcacgtc

SEQ ID NO: 8520 - DNA, 18 bp, Artificial Sequence
  Synthetic Polynucleotide
aaattctgtttcccagca

SEQ ID NO: 8521 - DNA, 17 bp, Artificial Sequence
  Synthetic Polynucleotide
gcttgtcaccaaagtca

SEQ ID NO: 8522 - DNA, 17 bp, Artificial Sequence
  Synthetic Polynucleotide
tcacatccaatccacag

SEQ ID NO: 8523 - DNA, 18 bp, Artificial Sequence
  Synthetic Polynucleotide
gccaatatagcacttagc

SEQ ID NO: 8524 - DNA, 17 bp, Artificial Sequence
  Synthetic Polynucleotide
ccgcctccttccatagg

SEQ ID NO: 8525 - DNA, 18 bp, Artificial Sequence
  Synthetic Polynucleotide
aaactcacaaaccctgtg

SEQ ID NO: 8526 - DNA, 18 bp, Artificial Sequence
  Synthetic Polynucleotide
cgatcttaccatccacag

SEQ ID NO: 8527 - DNA, 17 bp, Artificial Sequence
  Synthetic Polynucleotide
cgcattcctcacaatac

SEQ ID NO: 8528 - DNA, 17 bp, Artificial Sequence
  Synthetic Polynucleotide
tatcacccattcacaga

SEQ ID NO: 8529 - DNA, 18 bp, Artificial Sequence
  Synthetic Polynucleotide
aattcttcacaaccccat

SEQ ID NO: 8530 - DNA, 18 bp, Artificial Sequence
  Synthetic Polynucleotide
tacaatacgctacccaat

SEQ ID NO: 8531 - DNA, 17 bp, Artificial Sequence
  Synthetic Polynucleotide
acccacccaacccaatc

SEQ ID NO: 8532 - DNA, 17 bp, Artificial Sequence
  Synthetic Polynucleotide
gcacaaagtctcattga

SEQ ID NO: 8533 - DNA, 18 bp, Artificial Sequence
  Synthetic Polynucleotide
gattgcctctcatcctct

SEQ ID NO: 8534 - DNA, 18 bp, Artificial Sequence
  Synthetic Polynucleotide
gcacccaaattcttcgca

SEQ ID NO: 8535 - DNA, 17 bp, Artificial Sequence
  Synthetic Polynucleotide
acaggccccactatagg

SEQ ID NO: 8536 - DNA, 17 bp, Artificial Sequence
  Synthetic Polynucleotide
gccgcacagccctttat

SEQ ID NO: 8537 - DNA, 17 bp, Artificial Sequence
  Synthetic Polynucleotide
cgaatcctcattccctt

SEQ ID NO: 8538 - DNA, 17 bp, Artificial Sequence
  Synthetic Polynucleotide
tgatctcaaccaccttg

SEQ ID NO: 8539 - DNA, 17 bp, Artificial Sequence
  Synthetic Polynucleotide
acagcacaaccttcaaa

SEQ ID NO: 8540 - DNA, 18 bp, Artificial Sequence
  Synthetic Polynucleotide
aaaatcatgaccctcaca

SEQ ID NO: 8541 - DNA, 17 bp, Artificial Sequence
  Synthetic Polynucleotide
gtcacctgccctaaagg

SEQ ID NO: 8542 - DNA, 18 bp, Artificial Sequence
  Synthetic Polynucleotide
tagtagtagactccgcac

SEQ ID NO: 8543 - DNA, 17 bp, Artificial Sequence
  Synthetic Polynucleotide
cctttcacttcagcaag

SEQ ID NO: 8544 - DNA, 18 bp, Artificial Sequence
  Synthetic Polynucleotide
tcttcttcctcaatcaga

SEQ ID NO: 8545 - DNA, 17 bp, Artificial Sequence
  Synthetic Polynucleotide
cctttcacctcagcaag

SEQ ID NO: 8546 - DNA, 18 bp, Artificial Sequence
  Synthetic Polynucleotide
ctaaacccacccacaacg

SEQ ID NO: 8547 - DNA, 18 bp, Artificial Sequence
  Synthetic Polynucleotide
agtcaccatcatccatct

SEQ ID NO: 8548 - DNA, 18 bp, Artificial Sequence
  Synthetic Polynucleotide
gcacacataattccacag

SEQ ID NO: 8549 - DNA, 18 bp, Artificial Sequence
  Synthetic Polynucleotide
gcaaaagtccctcatagt

SEQ ID NO: 8550 - DNA, 17 bp, Artificial Sequence
  Synthetic Polynucleotide
tgtgacccattcacctt

SEQ ID NO: 8551 - DNA, 17 bp, Artificial Sequence
  Synthetic Polynucleotide
tccaacagcattcctta

SEQ ID NO: 8552 - DNA, 18 bp, Artificial Sequence
  Synthetic Polynucleotide
cagacagatctcccatac

SEQ ID NO: 8553 - DNA, 18 bp, Artificial Sequence
  Synthetic Polynucleotide
gcaaaatcccctaaatcg

SEQ ID NO: 8554 - DNA, 17 bp, Artificial Sequence
  Synthetic Polynucleotide
ttcacactcatgacgtt

SEQ ID NO: 8555 - DNA, 17 bp, Artificial Sequence
  Synthetic Polynucleotide
cactaagacccaacctc

SEQ ID NO: 8556 - DNA, 18 bp, Artificial Sequence
  Synthetic Polynucleotide
caagtatcgcccattatc

SEQ ID NO: 8557 - DNA, 17 bp, Artificial Sequence
  Synthetic Polynucleotide
tccttcacagcagctat

SEQ ID NO: 8558 - DNA, 18 bp, Artificial Sequence
  Synthetic Polynucleotide
ccttactcaaacctctca

SEQ ID NO: 8559 - DNA, 18 bp, Artificial Sequence
  Synthetic Polynucleotide
tatccagcagttatccta

SEQ ID NO: 8560 - DNA, 17 bp, Artificial Sequence
  Synthetic Polynucleotide
aatcacactcatgacgg

SEQ ID NO: 8561 - DNA, 18 bp, Artificial Sequence
  Synthetic Polynucleotide
tcgaaaaccaaaacatct

SEQ ID NO: 8562 - DNA, 18 bp, Artificial Sequence
  Synthetic Polynucleotide
tagccttttcaaatctcc

SEQ ID NO: 8563 - DNA, 18 bp, Artificial Sequence
  Synthetic Polynucleotide
tattttcaaccacccttc

SEQ ID NO: 8564 - DNA, 18 bp, Artificial Sequence
  Synthetic Polynucleotide
ccaagttcctttcatcta

SEQ ID NO: 8565 - DNA, 18 bp, Artificial Sequence
  Synthetic Polynucleotide
gttcagtcacttagcata

SEQ ID NO: 8566 - DNA, 18 bp, Artificial Sequence
  Synthetic Polynucleotide
tgcccattaccaaataga

SEQ ID NO: 8567 - DNA, 17 bp, Artificial Sequence
  Synthetic Polynucleotide
ttgttcccacttcaaga

SEQ ID NO: 8568 - DNA, 18 bp, Artificial Sequence
  Synthetic Polynucleotide
aacatgcttttccacatt

SEQ ID NO: 8569 - DNA, 18 bp, Artificial Sequence
  Synthetic Polynucleotide
tttgcccatcattcagat

SEQ ID NO: 8570 - DNA, 18 bp, Artificial Sequence
  Synthetic Polynucleotide
tcaccatatgactaccta

SEQ ID NO: 8571 - DNA, 18 bp, Artificial Sequence
  Synthetic Polynucleotide
tggacccaaaatttctgg

SEQ ID NO: 8572 - DNA, 18 bp, Artificial Sequence
  Synthetic Polynucleotide
aaatccacagtccctatt

SEQ ID NO: 8573 - DNA, 18 bp, Artificial Sequence
  Synthetic Polynucleotide
ttccatcatactcacaga

SEQ ID NO: 8574 - DNA, 18 bp, Artificial Sequence
  Synthetic Polynucleotide
aaccctctgatacattgc

SEQ ID NO: 8575 - DNA, 18 bp, Artificial Sequence
  Synthetic Polynucleotide
aagcccaagcctaccatg

SEQ ID NO: 8576 - DNA, 18 bp, Artificial Sequence
  Synthetic Polynucleotide
gtacaaacccctttcaga

SEQ ID NO: 8577 - DNA, 18 bp, Artificial Sequence
  Synthetic Polynucleotide
tcacacctgccttccaaa

SEQ ID NO: 8578 - DNA, 17 bp, Artificial Sequence
  Synthetic Polynucleotide
ttgaccaaatacctgca

SEQ ID NO: 8579 - DNA, 18 bp, Artificial Sequence
  Synthetic Polynucleotide
tactcacaaactctcttg

SEQ ID NO: 8580 - DNA, 17 bp, Artificial Sequence
  Synthetic Polynucleotide
tcggaccctatacatcc

SEQ ID NO: 8581 - DNA, 17 bp, Artificial Sequence
  Synthetic Polynucleotide
ccagtccattccactgc

SEQ ID NO: 8582 - DNA, 17 bp, Artificial Sequence
  Synthetic Polynucleotide
aatccaatcacacccat

SEQ ID NO: 8583 - DNA, 18 bp, Artificial Sequence
  Synthetic Polynucleotide
ttgccctaccgataattc

SEQ ID NO: 8584 - DNA, 17 bp, Artificial Sequence
  Synthetic Polynucleotide
tccttcctcctcaacag

SEQ ID NO: 8585 - DNA, 18 bp, Artificial Sequence
  Synthetic Polynucleotide
tagacacaaaccatcata

SEQ ID NO: 8586 - DNA, 17 bp, Artificial Sequence
  Synthetic Polynucleotide
tctcctgcctcatccat

SEQ ID NO: 8587 - DNA, 17 bp, Artificial Sequence
  Synthetic Polynucleotide
ttaacaccgctcgaatt

SEQ ID NO: 8588 - DNA, 18 bp, Artificial Sequence
  Synthetic Polynucleotide
ccccaataaccactcacc

SEQ ID NO: 8589 - DNA, 17 bp, Artificial Sequence
  Synthetic Polynucleotide
ggttctagcacagctaa

SEQ ID NO: 8590 - DNA, 17 bp, Artificial Sequence
  Synthetic Polynucleotide
tcaacatcagcaagtca

SEQ ID NO: 8591 - DNA, 17 bp, Artificial Sequence
  Synthetic Polynucleotide
ctcatctctcacatccg

SEQ ID NO: 8592 - DNA, 18 bp, Artificial Sequence
  Synthetic Polynucleotide
gaggacataaacccctat

SEQ ID NO: 8593 - DNA, 17 bp, Artificial Sequence
  Synthetic Polynucleotide
gcaacctcaaagaagta

SEQ ID NO: 8594 - DNA, 18 bp, Artificial Sequence
  Synthetic Polynucleotide
cttatcatacagctccga

SEQ ID NO: 8595 - DNA, 17 bp, Artificial Sequence
  Synthetic Polynucleotide
tttgccttcctcttgtt

SEQ ID NO: 8596 - DNA, 18 bp, Artificial Sequence
  Synthetic Polynucleotide
agtttcagcatccatcca

SEQ ID NO: 8597 - DNA, 17 bp, Artificial Sequence
  Synthetic Polynucleotide
gctactcactctcccat

SEQ ID NO: 8598 - DNA, 18 bp, Artificial Sequence
  Synthetic Polynucleotide
cttcacaaccccaccaag

SEQ ID NO: 8599 - DNA, 17 bp, Artificial Sequence
  Synthetic Polynucleotide
atgcagccacactctcc

SEQ ID NO: 8600 - DNA, 18 bp, Artificial Sequence
  Synthetic Polynucleotide
tattacaacactcccaac

SEQ ID NO: 8601 - DNA, 17 bp, Artificial Sequence
  Synthetic Polynucleotide
ctctcagcccaatcctt

SEQ ID NO: 8602 - DNA, 17 bp, Artificial Sequence
  Synthetic Polynucleotide
ttccagcacagatcaaa

SEQ ID NO: 8603 - DNA, 17 bp, Artificial Sequence
  Synthetic Polynucleotide
ccatcattacgccgact

SEQ ID NO: 8604 - DNA, 18 bp, Artificial Sequence
  Synthetic Polynucleotide
tccctaatcatccaacag

SEQ ID NO: 8605 - DNA, 17 bp, Artificial Sequence
  Synthetic Polynucleotide
gcccttaaacccaccct

SEQ ID NO: 8606 - DNA, 17 bp, Artificial Sequence
  Synthetic Polynucleotide
aagagccactcaaactg

SEQ ID NO: 8607 - DNA, 17 bp, Artificial Sequence
  Synthetic Polynucleotide
cccttaaacccacccta

SEQ ID NO: 8608 - DNA, 18 bp, Artificial Sequence
  Synthetic Polynucleotide
gccactatattcgcagat

SEQ ID NO: 8609 - DNA, 17 bp, Artificial Sequence
  Synthetic Polynucleotide
aacatttctgccccagg

SEQ ID NO: 8610 - DNA, 17 bp, Artificial Sequence
  Synthetic Polynucleotide
acctcattcaagcagca

SEQ ID NO: 8611 - DNA, 18 bp, Artificial Sequence
  Synthetic Polynucleotide
taccacactctgtaattg

SEQ ID NO: 8612 - DNA, 18 bp, Artificial Sequence
  Synthetic Polynucleotide
gtccatacaattccatgc

SEQ ID NO: 8613 - DNA, 17 bp, Artificial Sequence
  Synthetic Polynucleotide
acagcctgttccaactc

SEQ ID NO: 8614 - DNA, 18 bp, Artificial Sequence
  Synthetic Polynucleotide
ttccaagcccactataaa

SEQ ID NO: 8615 - DNA, 18 bp, Artificial Sequence
  Synthetic Polynucleotide
catttccctcagcatcta

SEQ ID NO: 8616 - DNA, 18 bp, Artificial Sequence
  Synthetic Polynucleotide
aacactgttccaaccaat

SEQ ID NO: 8617 - DNA, 17 bp, Artificial Sequence
  Synthetic Polynucleotide
ctccctctcattgcttc

SEQ ID NO: 8618 - DNA, 18 bp, Artificial Sequence
  Synthetic Polynucleotide
tgcatcatattgctttcc

SEQ ID NO: 8619 - DNA, 18 bp, Artificial Sequence
  Synthetic Polynucleotide
agactccttatccactga

SEQ ID NO: 8620 - DNA, 17 bp, Artificial Sequence
  Synthetic Polynucleotide
cccctaccacccaccca

SEQ ID NO: 8621 - DNA, 18 bp, Artificial Sequence
  Synthetic Polynucleotide
tatctctccttcttccca

SEQ ID NO: 8622 - DNA, 18 bp, Artificial Sequence
  Synthetic Polynucleotide
tctaaactaccccatcaa

SEQ ID NO: 8623 - DNA, 18 bp, Artificial Sequence
  Synthetic Polynucleotide
ttgcacacctgttcataa

SEQ ID NO: 8624 - DNA, 18 bp, Artificial Sequence
  Synthetic Polynucleotide
gcaccagttatattccct

SEQ ID NO: 8625 - DNA, 18 bp, Artificial Sequence
  Synthetic Polynucleotide
aactattcccctctctcc

SEQ ID NO: 8626 - DNA, 18 bp, Artificial Sequence
  Synthetic Polynucleotide
aaaatttcactcgcctca

SEQ ID NO: 8627 - DNA, 18 bp, Artificial Sequence
  Synthetic Polynucleotide
tcatctctcatccattgt

SEQ ID NO: 8628 - DNA, 18 bp, Artificial Sequence
  Synthetic Polynucleotide
gctcgaattttcttcctc

SEQ ID NO: 8629 - DNA, 17 bp, Artificial Sequence
  Synthetic Polynucleotide
atgcatttcagcatcta

SEQ ID NO: 8630 - DNA, 18 bp, Artificial Sequence
  Synthetic Polynucleotide
caccctaaaacaaccatg

SEQ ID NO: 8631 - DNA, 18 bp, Artificial Sequence
  Synthetic Polynucleotide
tgcccaaatattccattg

SEQ ID NO: 8632 - DNA, 18 bp, Artificial Sequence
  Synthetic Polynucleotide
gctcagtttcacagtact

SEQ ID NO: 8633 - DNA, 18 bp, Artificial Sequence
  Synthetic Polynucleotide
gttaaccacttccacctg

SEQ ID NO: 8634 - DNA, 17 bp, Artificial Sequence
  Synthetic Polynucleotide
gcaccgattattttccc

SEQ ID NO: 8635 - DNA, 18 bp, Artificial Sequence
  Synthetic Polynucleotide
tcaccataatcatccaca

SEQ ID NO: 8636 - DNA, 17 bp, Artificial Sequence
  Synthetic Polynucleotide
tcaaaccacctgttcat

SEQ ID NO: 8637 - DNA, 18 bp, Artificial Sequence
  Synthetic Polynucleotide
gtgccgcttacgcccaca

SEQ ID NO: 8638 - DNA, 18 bp, Artificial Sequence
  Synthetic Polynucleotide
actctctcccactaccat

SEQ ID NO: 8639 - DNA, 18 bp, Artificial Sequence
  Synthetic Polynucleotide
gcacctttcatctttctc

SEQ ID NO: 8640 - DNA, 17 bp, Artificial Sequence
  Synthetic Polynucleotide
ccgggatatcgctacca

SEQ ID NO: 8641 - DNA, 18 bp, Artificial Sequence
  Synthetic Polynucleotide
tcagacgtttccatagta

SEQ ID NO: 8642 - DNA, 18 bp, Artificial Sequence
  Synthetic Polynucleotide
tcacattagacgtttcca

SEQ ID NO: 8643 - DNA, 17 bp, Artificial Sequence
  Synthetic Polynucleotide
aaccccttccactagct

SEQ ID NO: 8644 - DNA, 17 bp, Artificial Sequence
  Synthetic Polynucleotide
tagtagtagactccgca

SEQ ID NO: 8645 - DNA, 17 bp, Artificial Sequence
  Synthetic Polynucleotide
cacaatcctcgaaacca

SEQ ID NO: 8646 - DNA, 18 bp, Artificial Sequence
  Synthetic Polynucleotide
actaaccaccacctttcg

SEQ ID NO: 8647 - DNA, 18 bp, Artificial Sequence
  Synthetic Polynucleotide
tcattgacatcacctgtt

SEQ ID NO: 8648 - DNA, 17 bp, Artificial Sequence
  Synthetic Polynucleotide
ggcttactcactccctc

SEQ ID NO: 8649 - DNA, 18 bp, Artificial Sequence
  Synthetic Polynucleotide
acaattcccacagtcgtt

SEQ ID NO: 8650 - DNA, 17 bp, Artificial Sequence
  Synthetic Polynucleotide
caatttccccatccacg

SEQ ID NO: 8651 - DNA, 18 bp, Artificial Sequence
  Synthetic Polynucleotide
ccctttaaaatcacctgc

SEQ ID NO: 8652 - DNA, 17 bp, Artificial Sequence
  Synthetic Polynucleotide
tcattgaccaaacgcaa

SEQ ID NO: 8653 - DNA, 17 bp, Artificial Sequence
  Synthetic Polynucleotide
ccgcacagccccaaatt

SEQ ID NO: 8654 - DNA, 17 bp, Artificial Sequence
  Synthetic Polynucleotide
cgcccttccaaaacgcc

SEQ ID NO: 8655 - DNA, 18 bp, Artificial Sequence
  Synthetic Polynucleotide
gcatcagctcccaattcg

SEQ ID NO: 8656 - DNA, 17 bp, Artificial Sequence
  Synthetic Polynucleotide
acgcttccttaacctta

SEQ ID NO: 8657 - DNA, 18 bp, Artificial Sequence
  Synthetic Polynucleotide
cctcattttccacaacct

SEQ ID NO: 8658 - DNA, 18 bp, Artificial Sequence
  Synthetic Polynucleotide
gtgccctcattcagtaaa

SEQ ID NO: 8659 - DNA, 18 bp, Artificial Sequence
  Synthetic Polynucleotide
agttccatccttagcatt

SEQ ID NO: 8660 - DNA, 17 bp, Artificial Sequence
  Synthetic Polynucleotide
accccttacacaccagc

SEQ ID NO: 8661 - DNA, 18 bp, Artificial Sequence
  Synthetic Polynucleotide
gttcacaatccacagcac

SEQ ID NO: 8662 - DNA, 18 bp, Artificial Sequence
  Synthetic Polynucleotide
actgaccacaaccactcc

SEQ ID NO: 8663 - DNA, 17 bp, Artificial Sequence
  Synthetic Polynucleotide
atttcacctttgcccac

SEQ ID NO: 8664 - DNA, 18 bp, Artificial Sequence
  Synthetic Polynucleotide
ttctgtaccaacttccag

SEQ ID NO: 8665 - DNA, 18 bp, Artificial Sequence
  Synthetic Polynucleotide
cctacacttatcaacgca

SEQ ID NO: 8666 - DNA, 18 bp, Artificial Sequence
  Synthetic Polynucleotide
tacaagcacatttatccg

SEQ ID NO: 8667 - DNA, 18 bp, Artificial Sequence
  Synthetic Polynucleotide
caagaccactgacatcaa

SEQ ID NO: 8668 - DNA, 18 bp, Artificial Sequence
  Synthetic Polynucleotide
ggcatcgtccattccctc

SEQ ID NO: 8669 - DNA, 18 bp, Artificial Sequence
  Synthetic Polynucleotide
acactccttcagattcag

SEQ ID NO: 8670 - DNA, 17 bp, Artificial Sequence
  Synthetic Polynucleotide
gcagacacaaactaggc

SEQ ID NO: 8671 - DNA, 17 bp, Artificial Sequence
  Synthetic Polynucleotide
gcagtccatcctttcac

SEQ ID NO: 8672 - DNA, 18 bp, Artificial Sequence
  Synthetic Polynucleotide
agcttccctttctattcc

SEQ ID NO: 8673 - DNA, 18 bp, Artificial Sequence
  Synthetic Polynucleotide
caaacccatgttccacat

SEQ ID NO: 8674 - DNA, 18 bp, Artificial Sequence
  Synthetic Polynucleotide
gcttcactcttatcatgc

SEQ ID NO: 8675 - DNA, 18 bp, Artificial Sequence
  Synthetic Polynucleotide
acaccctaaaccaagctc

SEQ ID NO: 8676 - DNA, 18 bp, Artificial Sequence
  Synthetic Polynucleotide
accacccagttttatgat

SEQ ID NO: 8677 - DNA, 18 bp, Artificial Sequence
  Synthetic Polynucleotide
tagataccctatcagtcc

SEQ ID NO: 8678 - DNA, 18 bp, Artificial Sequence
  Synthetic Polynucleotide
tcgctcagcatttactct

SEQ ID NO: 8679 - DNA, 17 bp, Artificial Sequence
  Synthetic Polynucleotide
tgcatccatccaccagc

SEQ ID NO: 8680 - DNA, 17 bp, Artificial Sequence
  Synthetic Polynucleotide
tgcttcctttccccaat

SEQ ID NO: 8681 - DNA, 17 bp, Artificial Sequence
  Synthetic Polynucleotide
caaccattcgcacatac

SEQ ID NO: 8682 - DNA, 18 bp, Artificial Sequence
  Synthetic Polynucleotide
atgacctcagcatcctca

SEQ ID NO: 8683 - DNA, 18 bp, Artificial Sequence
  Synthetic Polynucleotide
gcctcaaacaaccattca

SEQ ID NO: 8684 - DNA, 17 bp, Artificial Sequence
  Synthetic Polynucleotide
ggacaccatcactctgt

SEQ ID NO: 8685 - DNA, 18 bp, Artificial Sequence
  Synthetic Polynucleotide
ttctcagcactcctcact

SEQ ID NO: 8686 - DNA, 17 bp, Artificial Sequence
  Synthetic Polynucleotide
tccgacagcttcaaatg

SEQ ID NO: 8687 - DNA, 18 bp, Artificial Sequence
  Synthetic Polynucleotide
ggaccaccattctacttg

SEQ ID NO: 8688 - DNA, 18 bp, Artificial Sequence
  Synthetic Polynucleotide
tcagctaccattaaaccc

SEQ ID NO: 8689 - DNA, 18 bp, Artificial Sequence
  Synthetic Polynucleotide
tactttatcaccttctgc

SEQ ID NO: 8690 - DNA, 17 bp, Artificial Sequence
  Synthetic Polynucleotide
ctcttgttccccaacat

SEQ ID NO: 8691 - DNA, 17 bp, Artificial Sequence
  Synthetic Polynucleotide
cggaccaattccaaaag

SEQ ID NO: 8692 - DNA, 17 bp, Artificial Sequence
  Synthetic Polynucleotide
gcatcttcatattgccc

SEQ ID NO: 8693 - DNA, 18 bp, Artificial Sequence
  Synthetic Polynucleotide
taccatccattcacagaa

SEQ ID NO: 8694 - DNA, 18 bp, Artificial Sequence
  Synthetic Polynucleotide
tctcagtcccctctacgg

SEQ ID NO: 8695 - DNA, 18 bp, Artificial Sequence
  Synthetic Polynucleotide
tcttgacagcactaaaga

SEQ ID NO: 8696 - DNA, 18 bp, Artificial Sequence
  Synthetic Polynucleotide
tacaaaccaccatatctc

SEQ ID NO: 8697 - DNA, 18 bp, Artificial Sequence
  Synthetic Polynucleotide
accctcatcatacactct

SEQ ID NO: 8698 - DNA, 18 bp, Artificial Sequence
  Synthetic Polynucleotide
acttgacatcatcagacc

SEQ ID NO: 8699 - DNA, 18 bp, Artificial Sequence
  Synthetic Polynucleotide
aaacccaccaccattcct

SEQ ID NO: 8700 - DNA, 18 bp, Artificial Sequence
  Synthetic Polynucleotide
cacctttctacacctcaa

SEQ ID NO: 8701 - DNA, 18 bp, Artificial Sequence
  Synthetic Polynucleotide
tcacagtttcccaattta

SEQ ID NO: 8702 - DNA, 17 bp, Artificial Sequence
  Synthetic Polynucleotide
aacccttagaccaacac

SEQ ID NO: 8703 - DNA, 17 bp, Artificial Sequence
  Synthetic Polynucleotide
gcacccatctcactcat

SEQ ID NO: 8704 - DNA, 17 bp, Artificial Sequence
  Synthetic Polynucleotide
ctgacatccacaccact

SEQ ID NO: 8705 - DNA, 18 bp, Artificial Sequence
  Synthetic Polynucleotide
acaaatccataccaccag

SEQ ID NO: 8706 - DNA, 18 bp, Artificial Sequence
  Synthetic Polynucleotide
ttacccacccaagtaatt

SEQ ID NO: 8707 - DNA, 18 bp, Artificial Sequence
  Synthetic Polynucleotide
tacattcgccttatgaat

SEQ ID NO: 8708 - DNA, 17 bp, Artificial Sequence
  Synthetic Polynucleotide
tgtttccccatcatcaa

SEQ ID NO: 8709 - DNA, 18 bp, Artificial Sequence
  Synthetic Polynucleotide
tgacccacccaacccaat

SEQ ID NO: 8710 - DNA, 17 bp, Artificial Sequence
  Synthetic Polynucleotide
cacgcacacacatccaa

SEQ ID NO: 8711 - DNA, 18 bp, Artificial Sequence
  Synthetic Polynucleotide
actcccttatcctctcag

SEQ ID NO: 8712 - DNA, 18 bp, Artificial Sequence
  Synthetic Polynucleotide
tgaccacctcaaagaaag

SEQ ID NO: 8713 - DNA, 18 bp, Artificial Sequence
  Synthetic Polynucleotide
gctttctacactctcacc

SEQ ID NO: 8714 - DNA, 18 bp, Artificial Sequence
  Synthetic Polynucleotide
aaacaacccacaccaaca

SEQ ID NO: 8715 - DNA, 18 bp, Artificial Sequence
  Synthetic Polynucleotide
actttcacctccatcctg

SEQ ID NO: 8716 - DNA, 18 bp, Artificial Sequence
  Synthetic Polynucleotide
acacaacgctttcatttt

SEQ ID NO: 8717 - DNA, 17 bp, Artificial Sequence
  Synthetic Polynucleotide
gacagcctcctttcccc

SEQ ID NO: 8718 - DNA, 18 bp, Artificial Sequence
  Synthetic Polynucleotide
agcctaaaaccacctctg

SEQ ID NO: 8719 - DNA, 18 bp, Artificial Sequence
  Synthetic Polynucleotide
tcaaacaacttccacaaa

SEQ ID NO: 8720 - DNA, 17 bp, Artificial Sequence
  Synthetic Polynucleotide
cttcaccaccagcaaga

SEQ ID NO: 8721 - DNA, 18 bp, Artificial Sequence
  Synthetic Polynucleotide
gacaaccatcacaatcca

SEQ ID NO: 8722 - DNA, 17 bp, Artificial Sequence
  Synthetic Polynucleotide
tcacatcgccccagatt

SEQ ID NO: 8723 - DNA, 18 bp, Artificial Sequence
  Synthetic Polynucleotide
ttttgcccaatcaacctg

SEQ ID NO: 8724 - DNA, 17 bp, Artificial Sequence
  Synthetic Polynucleotide
acccaccccatcttgac

SEQ ID NO: 8725 - DNA, 17 bp, Artificial Sequence
  Synthetic Polynucleotide
tgttagcatcactagcc

SEQ ID NO: 8726 - DNA, 18 bp, Artificial Sequence
  Synthetic Polynucleotide
caccatccaacatttctt

SEQ ID NO: 8727 - DNA, 18 bp, Artificial Sequence
  Synthetic Polynucleotide
tgcataaccacccatatt

SEQ ID NO: 8728 - DNA, 18 bp, Artificial Sequence
  Synthetic Polynucleotide
tcacaaacaccttcttct

SEQ ID NO: 8729 - DNA, 18 bp, Artificial Sequence
  Synthetic Polynucleotide
atcccaagcctttattga

SEQ ID NO: 8730 - DNA, 18 bp, Artificial Sequence
  Synthetic Polynucleotide
tttcagcactagcagccc

SEQ ID NO: 8731 - DNA, 18 bp, Artificial Sequence
  Synthetic Polynucleotide
aacattgtcccttttccg

SEQ ID NO: 8732 - DNA, 17 bp, Artificial Sequence
  Synthetic Polynucleotide
tcagtctctgtaacctg

SEQ ID NO: 8733 - DNA, 18 bp, Artificial Sequence
  Synthetic Polynucleotide
gcatcatcaacaccactt

SEQ ID NO: 8734 - DNA, 17 bp, Artificial Sequence
  Synthetic Polynucleotide
tctatcagcctcagttc

SEQ ID NO: 8735 - DNA, 17 bp, Artificial Sequence
  Synthetic Polynucleotide
aacaaccacctgttaca

SEQ ID NO: 8736 - DNA, 17 bp, Artificial Sequence
  Synthetic Polynucleotide
tagtagactccgcaaga

SEQ ID NO: 8737 - DNA, 18 bp, Artificial Sequence
  Synthetic Polynucleotide
cttgacctcaatcaaagc

SEQ ID NO: 8738 - DNA, 18 bp, Artificial Sequence
  Synthetic Polynucleotide
caccaatcacacctgccc

SEQ ID NO: 8739 - DNA, 18 bp, Artificial Sequence
  Synthetic Polynucleotide
aattgtcccatacccagg

SEQ ID NO: 8740 - DNA, 18 bp, Artificial Sequence
  Synthetic Polynucleotide
tccccaaccacccaccca

SEQ ID NO: 8741 - DNA, 17 bp, Artificial Sequence
  Synthetic Polynucleotide
accttatcgcccctagt

SEQ ID NO: 8742 - DNA, 17 bp, Artificial Sequence
  Synthetic Polynucleotide
tcctctgatcccctaaa

SEQ ID NO: 8743 - DNA, 17 bp, Artificial Sequence
  Synthetic Polynucleotide
agtccaaccaagcagct

SEQ ID NO: 8744 - DNA, 17 bp, Artificial Sequence
  Synthetic Polynucleotide
tctgccttcttcctcca

SEQ ID NO: 8745 - DNA, 18 bp, Artificial Sequence
  Synthetic Polynucleotide
ctgacccaaaccaattgt

SEQ ID NO: 8746 - DNA, 18 bp, Artificial Sequence
  Synthetic Polynucleotide
tttcttcgcccaattaac

SEQ ID NO: 8747 - DNA, 18 bp, Artificial Sequence
  Synthetic Polynucleotide
ttcacttttcttcctcca

SEQ ID NO: 8748 - DNA, 17 bp, Artificial Sequence
  Synthetic Polynucleotide
gccctgttaccatagta

SEQ ID NO: 8749 - DNA, 18 bp, Artificial Sequence
  Synthetic Polynucleotide
cttatcatacagctccga

SEQ ID NO: 8750 - DNA, 18 bp, Artificial Sequence
  Synthetic Polynucleotide
ttaaatccacagtcccta

SEQ ID NO: 8751 - DNA, 18 bp, Artificial Sequence
  Synthetic Polynucleotide
tcacacctgccttccaaa

SEQ ID NO: 8752 - DNA, 17 bp, Artificial Sequence
  Synthetic Polynucleotide
ttgaccaaatacctgca

SEQ ID NO: 8753 - DNA, 17 bp, Artificial Sequence
  Synthetic Polynucleotide
gtcttaccttccaccgt

SEQ ID NO: 8754 - DNA, 18 bp, Artificial Sequence
  Synthetic Polynucleotide
ttccatcatactcacaga

SEQ ID NO: 8755 - DNA, 18 bp, Artificial Sequence
  Synthetic Polynucleotide
aaccctctgatacattgc

SEQ ID NO: 8756 - DNA, 18 bp, Artificial Sequence
  Synthetic Polynucleotide
tactcacaaactctcttg

SEQ ID NO: 8757 - DNA, 17 bp, Artificial Sequence
  Synthetic Polynucleotide
tcctattcccatgtacc

SEQ ID NO: 8758 - DNA, 17 bp, Artificial Sequence
  Synthetic Polynucleotide
ccagtccattccactgc

SEQ ID NO: 8759 - DNA, 17 bp, Artificial Sequence
  Synthetic Polynucleotide
tctcctgcctcatccat

SEQ ID NO: 8760 - DNA, 17 bp, Artificial Sequence
  Synthetic Polynucleotide
aacaccgctcgaatttt

SEQ ID NO: 8761 - DNA, 17 bp, Artificial Sequence
  Synthetic Polynucleotide
caagtccaagcctttca

SEQ ID NO: 8762 - DNA, 17 bp, Artificial Sequence
  Synthetic Polynucleotide
tgttgccttcgtccact

SEQ ID NO: 8763 - DNA, 17 bp, Artificial Sequence
  Synthetic Polynucleotide
aatccaatcacacccat

SEQ ID NO: 8764 - DNA, 18 bp, Artificial Sequence
  Synthetic Polynucleotide
ttgccctaccgataattc

SEQ ID NO: 8765 - DNA, 17 bp, Artificial Sequence
  Synthetic Polynucleotide
tccttcctcctcaacag

SEQ ID NO: 8766 - DNA, 18 bp, Artificial Sequence
  Synthetic Polynucleotide
tagacacaaaccatcata

SEQ ID NO: 8767 - DNA, 18 bp, Artificial Sequence
  Synthetic Polynucleotide
ccccaataaccactcacc

SEQ ID NO: 8768 - DNA, 18 bp, Artificial Sequence
  Synthetic Polynucleotide
tcaagcacagctaattta

SEQ ID NO: 8769 - DNA, 18 bp, Artificial Sequence
  Synthetic Polynucleotide
gaggacataaacccctat

SEQ ID NO: 8770 - DNA, 17 bp, Artificial Sequence
  Synthetic Polynucleotide
gcaacctcaaagaagta

SEQ ID NO: 8771 - DNA, 18 bp, Artificial Sequence
  Synthetic Polynucleotide
gtcactaaattgacctcg

SEQ ID NO: 8772 - DNA, 17 bp, Artificial Sequence
  Synthetic Polynucleotide
tttgccttcctcttgtt

SEQ ID NO: 8773 - DNA, 18 bp, Artificial Sequence
  Synthetic Polynucleotide
agtttcagcatccatcca

SEQ ID NO: 8774 - DNA, 17 bp, Artificial Sequence
  Synthetic Polynucleotide
gctactcactctcccat

SEQ ID NO: 8775 - DNA, 18 bp, Artificial Sequence
  Synthetic Polynucleotide
cttcacaaccccaccaag

SEQ ID NO: 8776 - DNA, 17 bp, Artificial Sequence
  Synthetic Polynucleotide
atgcagccacactctcc

SEQ ID NO: 8777 - DNA, 18 bp, Artificial Sequence
  Synthetic Polynucleotide
tattacaacactcccaac

SEQ ID NO: 8778 - DNA, 17 bp, Artificial Sequence
  Synthetic Polynucleotide
ctctcagcccaatcctt

SEQ ID NO: 8779 - DNA, 17 bp, Artificial Sequence
  Synthetic Polynucleotide
acgaccgaaacacctat

SEQ ID NO: 8780 - DNA, 17 bp, Artificial Sequence
  Synthetic Polynucleotide
ccatcattacgccgact

SEQ ID NO: 8781 - DNA, 18 bp, Artificial Sequence
  Synthetic Polynucleotide
tccctaatcatccaacag

SEQ ID NO: 8782 - DNA, 17 bp, Artificial Sequence
  Synthetic Polynucleotide
gcccttaaacccaccct

SEQ ID NO: 8783 - DNA, 17 bp, Artificial Sequence
  Synthetic Polynucleotide
aaccacttccatcttgg

SEQ ID NO: 8784 - DNA, 17 bp, Artificial Sequence
  Synthetic Polynucleotide
cccttaaacccacccta

SEQ ID NO: 8785 - DNA, 18 bp, Artificial Sequence
  Synthetic Polynucleotide
gccactatattcgcagat

SEQ ID NO: 8786 - DNA, 18 bp, Artificial Sequence
  Synthetic Polynucleotide
gctttccgcataaagttt

SEQ ID NO: 8787 - DNA, 17 bp, Artificial Sequence
  Synthetic Polynucleotide
tgcccattcctcccaaa

SEQ ID NO: 8788 - DNA, 18 bp, Artificial Sequence
  Synthetic Polynucleotide
taccacactctgtaattg

SEQ ID NO: 8789 - DNA, 18 bp, Artificial Sequence
  Synthetic Polynucleotide
gtccatacaattccatgc

SEQ ID NO: 8790 - DNA, 18 bp, Artificial Sequence
  Synthetic Polynucleotide
catttccctcagcatcta

SEQ ID NO: 8791 - DNA, 18 bp, Artificial Sequence
  Synthetic Polynucleotide
aacactgttccaaccaat

SEQ ID NO: 8792 - DNA, 17 bp, Artificial Sequence
  Synthetic Polynucleotide
ctccctctcattgcttc

SEQ ID NO: 8793 - DNA, 18 bp, Artificial Sequence
  Synthetic Polynucleotide
tcatctctcatccattgt

SEQ ID NO: 8794 - DNA, 17 bp, Artificial Sequence
  Synthetic Polynucleotide
cgctcgaattttcttcc

SEQ ID NO: 8795 - DNA, 18 bp, Artificial Sequence
  Synthetic Polynucleotide
tgcatcatattgctttcc

SEQ ID NO: 8796 - DNA, 18 bp, Artificial Sequence
  Synthetic Polynucleotide
agactccttatccactga

SEQ ID NO: 8797 - DNA, 17 bp, Artificial Sequence
  Synthetic Polynucleotide
cccctaccacccaccca

SEQ ID NO: 8798 - DNA, 17 bp, Artificial Sequence
  Synthetic Polynucleotide
atctctccttcttccca

SEQ ID NO: 8799 - DNA, 18 bp, Artificial Sequence
  Synthetic Polynucleotide
tctaaactaccccatcaa

SEQ ID NO: 8800 - DNA, 18 bp, Artificial Sequence
  Synthetic Polynucleotide
ttgcacacctgttcataa

SEQ ID NO: 8801 - DNA, 17 bp, Artificial Sequence
  Synthetic Polynucleotide
tcctttacctctcctgt

SEQ ID NO: 8802 - DNA, 18 bp, Artificial Sequence
  Synthetic Polynucleotide
tcctcaatcctctcagcc

SEQ ID NO: 8803 - DNA, 17 bp, Artificial Sequence
  Synthetic Polynucleotide
gcttcaaaaccagttga

SEQ ID NO: 8804 - DNA, 18 bp, Artificial Sequence
  Synthetic Polynucleotide
tctcctaagatagccttc

SEQ ID NO: 8805 - DNA, 17 bp, Artificial Sequence
  Synthetic Polynucleotide
tctacaaagcccagcta

SEQ ID NO: 8806 - DNA, 18 bp, Artificial Sequence
  Synthetic Polynucleotide
aagcagctcaccgagaaa

SEQ ID NO: 8807 - DNA, 17 bp, Artificial Sequence
  Synthetic Polynucleotide
atgcatttcagcatcta

SEQ ID NO: 8808 - DNA, 18 bp, Artificial Sequence
  Synthetic Polynucleotide
caccctaaaacaaccatg

SEQ ID NO: 8809 - DNA, 18 bp, Artificial Sequence
  Synthetic Polynucleotide
tgcccaaatattccattg

SEQ ID NO: 8810 - DNA, 17 bp, Artificial Sequence
  Synthetic Polynucleotide
gctctctgtttccctgt

SEQ ID NO: 8811 - DNA, 18 bp, Artificial Sequence
  Synthetic Polynucleotide
gtacgcctcagctctctg

SEQ ID NO: 8812 - DNA, 18 bp, Artificial Sequence
  Synthetic Polynucleotide
ttttagcctcttcgttta

SEQ ID NO: 8813 - DNA, 17 bp, Artificial Sequence
  Synthetic Polynucleotide
atcgcagccttatctct

SEQ ID NO: 8814 - DNA, 18 bp, Artificial Sequence
  Synthetic Polynucleotide
gctcagtttcacagtact

SEQ ID NO: 8815 - DNA, 18 bp, Artificial Sequence
  Synthetic Polynucleotide
gccttcctttcaatcctt

SEQ ID NO: 8816 - DNA, 17 bp, Artificial Sequence
  Synthetic Polynucleotide
gcaccgattattttccc

SEQ ID NO: 8817 - DNA, 18 bp, Artificial Sequence
  Synthetic Polynucleotide
tcaccataatcatccaca

SEQ ID NO: 8818 - DNA, 17 bp, Artificial Sequence
  Synthetic Polynucleotide
tcaaaccacctgttcat

SEQ ID NO: 8819 - DNA, 18 bp, Artificial Sequence
  Synthetic Polynucleotide
gtgccgcttacgcccaca

SEQ ID NO: 8820 - DNA, 18 bp, Artificial Sequence
  Synthetic Polynucleotide
gcacctttcatctttctc

SEQ ID NO: 8821 - DNA, 18 bp, Artificial Sequence
  Synthetic Polynucleotide
gggatatcgctaccattc

SEQ ID NO: 8822 - DNA, 18 bp, Artificial Sequence
  Synthetic Polynucleotide
tcagacgtttccatagta

SEQ ID NO: 8823 - DNA, 18 bp, Artificial Sequence
  Synthetic Polynucleotide
tcacattagacgtttcca

SEQ ID NO: 8824 - DNA, 18 bp, Artificial Sequence
  Synthetic Polynucleotide
tccactttcatttcatga

SEQ ID NO: 8825 - DNA, 17 bp, Artificial Sequence
  Synthetic Polynucleotide
tagtagtagactccgca

SEQ ID NO: 8826 - DNA, 17 bp, Artificial Sequence
  Synthetic Polynucleotide
cacaatcctcgaaacca

SEQ ID NO: 8827 - DNA, 18 bp, Artificial Sequence
  Synthetic Polynucleotide
ggatactaaccaccacct

SEQ ID NO: 8828 - DNA, 17 bp, Artificial Sequence
  Synthetic Polynucleotide
catccattcttccgctg

SEQ ID NO: 8829 - DNA, 18 bp, Artificial Sequence
  Synthetic Polynucleotide
ttctacccacttgtcata

SEQ ID NO: 8830 - DNA, 17 bp, Artificial Sequence
  Synthetic Polynucleotide
attcccacagtcgttag

SEQ ID NO: 8831 - DNA, 17 bp, Artificial Sequence
  Synthetic Polynucleotide
caatttccccatccacg

SEQ ID NO: 8832 - DNA, 17 bp, Artificial Sequence
  Synthetic Polynucleotide
tcccatcgctcgaatct

SEQ ID NO: 8833 - DNA, 18 bp, Artificial Sequence
  Synthetic Polynucleotide
ctttagaccagtaccagg

SEQ ID NO: 8834 - DNA, 18 bp, Artificial Sequence
  Synthetic Polynucleotide
ccctttaaaatcacctgc

SEQ ID NO: 8835 - DNA, 17 bp, Artificial Sequence
  Synthetic Polynucleotide
tcattgaccaaacgcaa

SEQ ID NO: 8836 - DNA, 17 bp, Artificial Sequence
  Synthetic Polynucleotide
ccgcacagccccaaatt

SEQ ID NO: 8837 - DNA, 17 bp, Artificial Sequence
  Synthetic Polynucleotide
cgcccttccaaaacgcc

SEQ ID NO: 8838 - DNA, 18 bp, Artificial Sequence
  Synthetic Polynucleotide
gcagctctaaaatcagta

SEQ ID NO: 8839 - DNA, 17 bp, Artificial Sequence
  Synthetic Polynucleotide
tagctcctcactaacct

SEQ ID NO: 8840 - DNA, 18 bp, Artificial Sequence
  Synthetic Polynucleotide
ttgcagcccataaaatgg

SEQ ID NO: 8841 - DNA, 18 bp, Artificial Sequence
  Synthetic Polynucleotide
cattccaagcccactata

SEQ ID NO: 8842 - DNA, 18 bp, Artificial Sequence
  Synthetic Polynucleotide
gcatcagctcccaattcg

SEQ ID NO: 8843 - DNA, 17 bp, Artificial Sequence
  Synthetic Polynucleotide
acgcttccttaacctta

SEQ ID NO: 8844 - DNA, 18 bp, Artificial Sequence
  Synthetic Polynucleotide
gctcacctcattttccac

SEQ ID NO: 8845 - DNA, 18 bp, Artificial Sequence
  Synthetic Polynucleotide
gtgccctcattcagtaaa

SEQ ID NO: 8846 - DNA, 18 bp, Artificial Sequence
  Synthetic Polynucleotide
agttccatccttagcatt

SEQ ID NO: 8847 - DNA, 17 bp, Artificial Sequence
  Synthetic Polynucleotide
accccttacacaccagc

SEQ ID NO: 8848 - DNA, 18 bp, Artificial Sequence
  Synthetic Polynucleotide
tcacaatccacagcactg

SEQ ID NO: 8849 - DNA, 18 bp, Artificial Sequence
  Synthetic Polynucleotide
ttctgtaccaacttccag

SEQ ID NO: 8850 - DNA, 18 bp, Artificial Sequence
  Synthetic Polynucleotide
cctacacttatcaacgca

SEQ ID NO: 8851 - DNA, 17 bp, Artificial Sequence
  Synthetic Polynucleotide
ctcgtccaacatcatgt

SEQ ID NO: 8852 - DNA, 18 bp, Artificial Sequence
  Synthetic Polynucleotide
acactccttcagattcag

SEQ ID NO: 8853 - DNA, 17 bp, Artificial Sequence
  Synthetic Polynucleotide
gcagacacaaactaggc

SEQ ID NO: 8854 - DNA, 17 bp, Artificial Sequence
  Synthetic Polynucleotide
gcagtccatcctttcac

SEQ ID NO: 8855 - DNA, 17 bp, Artificial Sequence
  Synthetic Polynucleotide
tcatcagctctcattgt

SEQ ID NO: 8856 - DNA, 17 bp, Artificial Sequence
  Synthetic Polynucleotide
aaacctgtagacccaac

SEQ ID NO: 8857 - DNA, 18 bp, Artificial Sequence
  Synthetic Polynucleotide
agcttccctttctattcc

SEQ ID NO: 8858 - DNA, 18 bp, Artificial Sequence
  Synthetic Polynucleotide
caaacccatgttccacat

SEQ ID NO: 8859 - DNA, 18 bp, Artificial Sequence
  Synthetic Polynucleotide
atgatcttcacctcttgg

SEQ ID NO: 8860 - DNA, 18 bp, Artificial Sequence
  Synthetic Polynucleotide
atacctcatcactcctgt

SEQ ID NO: 8861 - DNA, 18 bp, Artificial Sequence
  Synthetic Polynucleotide
tcgctcagcatttactct

SEQ ID NO: 8862 - DNA, 17 bp, Artificial Sequence
  Synthetic Polynucleotide
tgcatccatccaccagc

SEQ ID NO: 8863 - DNA, 18 bp, Artificial Sequence
  Synthetic Polynucleotide
atgacctcagcatcctca

SEQ ID NO: 8864 - DNA, 18 bp, Artificial Sequence
  Synthetic Polynucleotide
ctcaaacaaccattcacg

SEQ ID NO: 8865 - DNA, 17 bp, Artificial Sequence
  Synthetic Polynucleotide
ggacaccatcactctgt

SEQ ID NO: 8866 - DNA, 18 bp, Artificial Sequence
  Synthetic Polynucleotide
ttctcagcactcctcact

SEQ ID NO: 8867 - DNA, 17 bp, Artificial Sequence
  Synthetic Polynucleotide
tccgacagcttcaaatg

SEQ ID NO: 8868 - DNA, 18 bp, Artificial Sequence
  Synthetic Polynucleotide
ggaccaccattctacttg

SEQ ID NO: 8869 - DNA, 18 bp, Artificial Sequence
  Synthetic Polynucleotide
tcagctaccattaaaccc

SEQ ID NO: 8870 - DNA, 18 bp, Artificial Sequence
  Synthetic Polynucleotide
atattgttccaaccctgc

SEQ ID NO: 8871 - DNA, 17 bp, Artificial Sequence
  Synthetic Polynucleotide
ctcttgttccccaacat

SEQ ID NO: 8872 - DNA, 18 bp, Artificial Sequence
  Synthetic Polynucleotide
cggaccaattccaaaaga

SEQ ID NO: 8873 - DNA, 17 bp, Artificial Sequence
  Synthetic Polynucleotide
gacctccacgcagacca

SEQ ID NO: 8874 - DNA, 17 bp, Artificial Sequence
  Synthetic Polynucleotide
tccactgacatcaaagg

SEQ ID NO: 8875 - DNA, 17 bp, Artificial Sequence
  Synthetic Polynucleotide
gcatcttcatattgccc

SEQ ID NO: 8876 - DNA, 18 bp, Artificial Sequence
  Synthetic Polynucleotide
taccatccattcacagaa

SEQ ID NO: 8877 - DNA, 18 bp, Artificial Sequence
  Synthetic Polynucleotide
tctcagtcccctctacgg

SEQ ID NO: 8878 - DNA, 18 bp, Artificial Sequence
  Synthetic Polynucleotide
tcttgacagcactaaaga

SEQ ID NO: 8879 - DNA, 18 bp, Artificial Sequence
  Synthetic Polynucleotide
ccctactataccaaaccc

SEQ ID NO: 8880 - DNA, 18 bp, Artificial Sequence
  Synthetic Polynucleotide
accctcatcatacactct

SEQ ID NO: 8881 - DNA, 18 bp, Artificial Sequence
  Synthetic Polynucleotide
acttgacatcatcagacc

SEQ ID NO: 8882 - DNA, 17 bp, Artificial Sequence
  Synthetic Polynucleotide
cgaactcttcacaaccc

SEQ ID NO: 8883 - DNA, 18 bp, Artificial Sequence
  Synthetic Polynucleotide
tcagaaataccagcatta

SEQ ID NO: 8884 - DNA, 18 bp, Artificial Sequence
  Synthetic Polynucleotide
aaacccaccaccattcct

SEQ ID NO: 8885 - DNA, 18 bp, Artificial Sequence
  Synthetic Polynucleotide
cacctttctacacctcaa

SEQ ID NO: 8886 - DNA, 17 bp, Artificial Sequence
  Synthetic Polynucleotide
atggttcctcttcacta

SEQ ID NO: 8887 - DNA, 17 bp, Artificial Sequence
  Synthetic Polynucleotide
atgtacctcagcaagac

SEQ ID NO: 8888 - DNA, 18 bp, Artificial Sequence
  Synthetic Polynucleotide
acccatctcactcattcg

SEQ ID NO: 8889 - DNA, 17 bp, Artificial Sequence
  Synthetic Polynucleotide
ctgacatccacaccact

SEQ ID NO: 8890 - DNA, 18 bp, Artificial Sequence
  Synthetic Polynucleotide
acaaatccataccaccag

SEQ ID NO: 8891 - DNA, 18 bp, Artificial Sequence
  Synthetic Polynucleotide
ttacccacccaagtaatt

SEQ ID NO: 8892 - DNA, 17 bp, Artificial Sequence
  Synthetic Polynucleotide
tcaaccttcctgttagc

SEQ ID NO: 8893 - DNA, 18 bp, Artificial Sequence
  Synthetic Polynucleotide
gccaccaaagtaaaactg

SEQ ID NO: 8894 - DNA, 18 bp, Artificial Sequence
  Synthetic Polynucleotide
tgacccacccaacccaat

SEQ ID NO: 8895 - DNA, 17 bp, Artificial Sequence
  Synthetic Polynucleotide
cacgcacacacatccaa

SEQ ID NO: 8896 - DNA, 17 bp, Artificial Sequence
  Synthetic Polynucleotide
tccatcgcttacagcta

SEQ ID NO: 8897 - DNA, 18 bp, Artificial Sequence
  Synthetic Polynucleotide
cgcatcttactcttcaac

SEQ ID NO: 8898 - DNA, 17 bp, Artificial Sequence
  Synthetic Polynucleotide
ccaaattgctctcaacc

SEQ ID NO: 8899 - DNA, 18 bp, Artificial Sequence
  Synthetic Polynucleotide
tgacatcagacaccacaa

SEQ ID NO: 8900 - DNA, 17 bp, Artificial Sequence
  Synthetic Polynucleotide
ctgacctctcttccctt

SEQ ID NO: 8901 - DNA, 17 bp, Artificial Sequence
  Synthetic Polynucleotide
gcaccaactcacaaagg

SEQ ID NO: 8902 - DNA, 17 bp, Artificial Sequence
  Synthetic Polynucleotide
gacacccatctcactga

SEQ ID NO: 8903 - DNA, 17 bp, Artificial Sequence
  Synthetic Polynucleotide
cagaaaccttcccaact

SEQ ID NO: 8904 - DNA, 18 bp, Artificial Sequence
  Synthetic Polynucleotide
accatccaattcccactt

SEQ ID NO: 8905 - DNA, 17 bp, Artificial Sequence
  Synthetic Polynucleotide
ggttctagcacagctaa

SEQ ID NO: 8906 - DNA, 18 bp, Artificial Sequence
  Synthetic Polynucleotide
cacgtacaaaacccacat

SEQ ID NO: 8907 - DNA, 17 bp, Artificial Sequence
  Synthetic Polynucleotide
tctcacaaactacccta

SEQ ID NO: 8908 - DNA, 17 bp, Artificial Sequence
  Synthetic Polynucleotide
tctttgcttcacttacg

SEQ ID NO: 8909 - DNA, 18 bp, Artificial Sequence
  Synthetic Polynucleotide
aacaaaatcatcagcagc

SEQ ID NO: 8910 - DNA, 17 bp, Artificial Sequence
  Synthetic Polynucleotide
gggatacacctctcaca

SEQ ID NO: 8911 - DNA, 18 bp, Artificial Sequence
  Synthetic Polynucleotide
agttcccagcttccaagc

SEQ ID NO: 8912 - DNA, 17 bp, Artificial Sequence
  Synthetic Polynucleotide
gcaccacagcagcattt

SEQ ID NO: 8913 - DNA, 18 bp, Artificial Sequence
  Synthetic Polynucleotide
ccccaacccacttatata

SEQ ID NO: 8914 - DNA, 18 bp, Artificial Sequence
  Synthetic Polynucleotide
tcaaaccgcttatattcg

SEQ ID NO: 8915 - DNA, 17 bp, Artificial Sequence
  Synthetic Polynucleotide
gcatctaacccagcata

SEQ ID NO: 8916 - DNA, 18 bp, Artificial Sequence
  Synthetic Polynucleotide
tccacactacataccaat

SEQ ID NO: 8917 - DNA, 18 bp, Artificial Sequence
  Synthetic Polynucleotide
aattcgcccttaaactca

SEQ ID NO: 8918 - DNA, 18 bp, Artificial Sequence
  Synthetic Polynucleotide
gcaccagttatattccct

SEQ ID NO: 8919 - DNA, 17 bp, Artificial Sequence
  Synthetic Polynucleotide
acccaatccttcacaaa

SEQ ID NO: 8920 - DNA, 17 bp, Artificial Sequence
  Synthetic Polynucleotide
agcccaaacacttgtat

SEQ ID NO: 8921 - DNA, 17 bp, Artificial Sequence
  Synthetic Polynucleotide
atctctcaccttctgcc

SEQ ID NO: 8922 - DNA, 18 bp, Artificial Sequence
  Synthetic Polynucleotide
tagtagactccctaaaga

SEQ ID NO: 8923 - DNA, 17 bp, Artificial Sequence
  Synthetic Polynucleotide
cgccgctttcataagat

SEQ ID NO: 8924 - DNA, 18 bp, Artificial Sequence
  Synthetic Polynucleotide
tgtctcgcataactaacg

SEQ ID NO: 8925 - DNA, 18 bp, Artificial Sequence
  Synthetic Polynucleotide
agttcaagactcttcctg

SEQ ID NO: 8926 - DNA, 18 bp, Artificial Sequence
  Synthetic Polynucleotide
acactgttccaaccaata

SEQ ID NO: 8927 - DNA, 17 bp, Artificial Sequence
  Synthetic Polynucleotide
agcacacctcagccctt

SEQ ID NO: 8928 - DNA, 17 bp, Artificial Sequence
  Synthetic Polynucleotide
tcaactttcacaccaag

SEQ ID NO: 8929 - DNA, 18 bp, Artificial Sequence
  Synthetic Polynucleotide
ttctttccccatttcaga

SEQ ID NO: 8930 - DNA, 18 bp, Artificial Sequence
  Synthetic Polynucleotide
cgacagtctcacagtttc

SEQ ID NO: 8931 - DNA, 18 bp, Artificial Sequence
  Synthetic Polynucleotide
gcaccctatacataccaa

SEQ ID NO: 8932 - DNA, 17 bp, Artificial Sequence
  Synthetic Polynucleotide
gactcaccatacatcgg

SEQ ID NO: 8933 - DNA, 18 bp, Artificial Sequence
  Synthetic Polynucleotide
gcttcaccattaacagca

SEQ ID NO: 8934 - DNA, 17 bp, Artificial Sequence
  Synthetic Polynucleotide
tccacatcactaaccca

SEQ ID NO: 8935 - DNA, 17 bp, Artificial Sequence
  Synthetic Polynucleotide
aaatcagaccaccctgc

SEQ ID NO: 8936 - DNA, 18 bp, Artificial Sequence
  Synthetic Polynucleotide
aagacagcatttcactgt

SEQ ID NO: 8937 - DNA, 18 bp, Artificial Sequence
  Synthetic Polynucleotide
gcccttatccacttacaa

SEQ ID NO: 8938 - DNA, 18 bp, Artificial Sequence
  Synthetic Polynucleotide
tcaagtcccagacatagc

SEQ ID NO: 8939 - DNA, 18 bp, Artificial Sequence
  Synthetic Polynucleotide
agccccattcttcgcaac

SEQ ID NO: 8940 - DNA, 18 bp, Artificial Sequence
  Synthetic Polynucleotide
tacccttattacccagcc

SEQ ID NO: 8941 - DNA, 17 bp, Artificial Sequence
  Synthetic Polynucleotide
tagccttcctctctggc

SEQ ID NO: 8942 - DNA, 18 bp, Artificial Sequence
  Synthetic Polynucleotide
cagaatcactcaaccttg

SEQ ID NO: 8943 - DNA, 18 bp, Artificial Sequence
  Synthetic Polynucleotide
cacttcctttcaaccttg

SEQ ID NO: 8944 - DNA, 17 bp, Artificial Sequence
  Synthetic Polynucleotide
tgcttcacatcctctgg

SEQ ID NO: 8945 - DNA, 17 bp, Artificial Sequence
  Synthetic Polynucleotide
ccttcacatccactagg

SEQ ID NO: 8946 - DNA, 18 bp, Artificial Sequence
  Synthetic Polynucleotide
tttcctcccaaagcctaa

SEQ ID NO: 8947 - DNA, 18 bp, Artificial Sequence
  Synthetic Polynucleotide
acatcttttccattgcac

SEQ ID NO: 8948 - DNA, 18 bp, Artificial Sequence
  Synthetic Polynucleotide
tcgacctcaatccactca

SEQ ID NO: 8949 - DNA, 18 bp, Artificial Sequence
  Synthetic Polynucleotide
cccatatctctgccttat

SEQ ID NO: 8950 - DNA, 18 bp, Artificial Sequence
  Synthetic Polynucleotide
tacattcttcccattagc

SEQ ID NO: 8951 - DNA, 17 bp, Artificial Sequence
  Synthetic Polynucleotide
tcctagcacaattcctc

SEQ ID NO: 8952 - DNA, 17 bp, Artificial Sequence
  Synthetic Polynucleotide
ggccctcatccacctca

SEQ ID NO: 8953 - DNA, 18 bp, Artificial Sequence
  Synthetic Polynucleotide
gccttcttcccattcagg

SEQ ID NO: 8954 - DNA, 17 bp, Artificial Sequence
  Synthetic Polynucleotide
caagcactttcaatccg

SEQ ID NO: 8955 - DNA, 17 bp, Artificial Sequence
  Synthetic Polynucleotide
gatttcctttccccagt

SEQ ID NO: 8956 - DNA, 18 bp, Artificial Sequence
  Synthetic Polynucleotide
gaatatcatcagcccagt

SEQ ID NO: 8957 - DNA, 18 bp, Artificial Sequence
  Synthetic Polynucleotide
actccttcctcttcttct

SEQ ID NO: 8958 - DNA, 18 bp, Artificial Sequence
  Synthetic Polynucleotide
tgtagacacaaatcacca

SEQ ID NO: 8959 - DNA, 18 bp, Artificial Sequence
  Synthetic Polynucleotide
tctcccataaccatcttc

SEQ ID NO: 8960 - DNA, 18 bp, Artificial Sequence
  Synthetic Polynucleotide
gccttttaaaatcagcct

SEQ ID NO: 8961 - DNA, 18 bp, Artificial Sequence
  Synthetic Polynucleotide
caacaaatctaccatcgc

SEQ ID NO: 8962 - DNA, 18 bp, Artificial Sequence
  Synthetic Polynucleotide
ttattccctcaccactgt

SEQ ID NO: 8963 - DNA, 17 bp, Artificial Sequence
  Synthetic Polynucleotide
caagctctcattgacca

SEQ ID NO: 8964 - DNA, 17 bp, Artificial Sequence
  Synthetic Polynucleotide
atgaccttcacgaactg

SEQ ID NO: 8965 - DNA, 18 bp, Artificial Sequence
  Synthetic Polynucleotide
ggaccttcctcataaagt

SEQ ID NO: 8966 - DNA, 18 bp, Artificial Sequence
  Synthetic Polynucleotide
actccttagtttccatcc

SEQ ID NO: 8967 - DNA, 18 bp, Artificial Sequence
  Synthetic Polynucleotide
tctttcaacccaaagtct

SEQ ID NO: 8968 - DNA, 17 bp, Artificial Sequence
  Synthetic Polynucleotide
tccgtcacttgaagatt

SEQ ID NO: 8969 - DNA, 17 bp, Artificial Sequence
  Synthetic Polynucleotide
tgaatgaagatggcgtc

SEQ ID NO: 8970 - DNA, 18 bp, Artificial Sequence
  Synthetic Polynucleotide
gtgtatgagtaagggtca

SEQ ID NO: 8971 - DNA, 17 bp, Artificial Sequence
  Synthetic Polynucleotide
gcctcctacatgggaat

SEQ ID NO: 8972 - DNA, 17 bp, Artificial Sequence
  Synthetic Polynucleotide
tccaagcacaagaagtc

SEQ ID NO: 8973 - DNA, 17 bp, Artificial Sequence
  Synthetic Polynucleotide
gcgtgtgggttgaagga

SEQ ID NO: 8974 - DNA, 17 bp, Artificial Sequence
  Synthetic Polynucleotide
tatggagcagacagtgc

SEQ ID NO: 8975 - DNA, 18 bp, Artificial Sequence
  Synthetic Polynucleotide
ttctgtgaagaggaagag

SEQ ID NO: 8976 - DNA, 18 bp, Artificial Sequence
  Synthetic Polynucleotide
atgtagtagaattgccga

SEQ ID NO: 8977 - DNA, 17 bp, Artificial Sequence
  Synthetic Polynucleotide
ccaattgttgattcggc

SEQ ID NO: 8978 - DNA, 18 bp, Artificial Sequence
  Synthetic Polynucleotide
taatccagggatcaatta

SEQ ID NO: 8979 - DNA, 17 bp, Artificial Sequence
  Synthetic Polynucleotide
aagatggcgtcgaatga

SEQ ID NO: 8980 - DNA, 18 bp, Artificial Sequence
  Synthetic Polynucleotide
tttggttaatttgcccgg

SEQ ID NO: 8981 - DNA, 18 bp, Artificial Sequence
  Synthetic Polynucleotide
tcagcagtctttgtgaat

SEQ ID NO: 8982 - DNA, 17 bp, Artificial Sequence
  Synthetic Polynucleotide
cattagcgttccaggag

SEQ ID NO: 8983 - DNA, 18 bp, Artificial Sequence
  Synthetic Polynucleotide
agaaggaaacatgagtga

SEQ ID NO: 8984 - DNA, 18 bp, Artificial Sequence
  Synthetic Polynucleotide
gagtcctaacatcagcaa

SEQ ID NO: 8985 - DNA, 18 bp, Artificial Sequence
  Synthetic Polynucleotide
gtaaatgatgatggcgtc

SEQ ID NO: 8986 - DNA, 17 bp, Artificial Sequence
  Synthetic Polynucleotide
caccaatgtcctgtgaa

SEQ ID NO: 8987 - DNA, 17 bp, Artificial Sequence
  Synthetic Polynucleotide
attgcgaccgagtggag

SEQ ID NO: 8988 - DNA, 17 bp, Artificial Sequence
  Synthetic Polynucleotide
gaagggtttcaccaaca

SEQ ID NO: 8989 - DNA, 17 bp, Artificial Sequence
  Synthetic Polynucleotide
tccttttggctttccag

SEQ ID NO: 8990 - DNA, 18 bp, Artificial Sequence
  Synthetic Polynucleotide
cataggtccagatgagtc

SEQ ID NO: 8991 - DNA, 18 bp, Artificial Sequence
  Synthetic Polynucleotide
aaaggtggggttagaaat

SEQ ID NO: 8992 - DNA, 18 bp, Artificial Sequence
  Synthetic Polynucleotide
ccgtgttgacaataccaa

SEQ ID NO: 8993 - DNA, 17 bp, Artificial Sequence
  Synthetic Polynucleotide
aagaagtacatggcccg

SEQ ID NO: 8994 - DNA, 18 bp, Artificial Sequence
  Synthetic Polynucleotide
catagggagcataactgg

SEQ ID NO: 8995 - DNA, 18 bp, Artificial Sequence
  Synthetic Polynucleotide
tgtgaatgaagatggcgt

SEQ ID NO: 8996 - DNA, 18 bp, Artificial Sequence
  Synthetic Polynucleotide
ccagaagcagcagtccac

SEQ ID NO: 8997 - DNA, 17 bp, Artificial Sequence
  Synthetic Polynucleotide
atgatggcgtcgaaaga

SEQ ID NO: 8998 - DNA, 18 bp, Artificial Sequence
  Synthetic Polynucleotide
taacgtggttaacgatct

SEQ ID NO: 8999 - DNA, 18 bp, Artificial Sequence
  Synthetic Polynucleotide
tcgtgttaagggagcaac

SEQ ID NO: 9000 - DNA, 18 bp, Artificial Sequence
  Synthetic Polynucleotide
cagaggtggggtaattgc

SEQ ID NO: 9001 - DNA, 18 bp, Artificial Sequence
  Synthetic Polynucleotide
cagggtaagtttgtggag

SEQ ID NO: 9002 - DNA, 17 bp, Artificial Sequence
  Synthetic Polynucleotide
actggggatgagttgag

SEQ ID NO: 9003 - DNA, 17 bp, Artificial Sequence
  Synthetic Polynucleotide
cagggttttgaccaggc

SEQ ID NO: 9004 - DNA, 17 bp, Artificial Sequence
  Synthetic Polynucleotide
tttgacatgccgtagtc

SEQ ID NO: 9005 - DNA, 18 bp, Artificial Sequence
  Synthetic Polynucleotide
ccagacagagagaacctt

SEQ ID NO: 9006 - DNA, 18 bp, Artificial Sequence
  Synthetic Polynucleotide
tcaagtcctgtatagtgg

SEQ ID NO: 9007 - DNA, 18 bp, Artificial Sequence
  Synthetic Polynucleotide
ttttgcgagaacttgagt

SEQ ID NO: 9008 - DNA, 17 bp, Artificial Sequence
  Synthetic Polynucleotide
gggtggtacatttcagg

SEQ ID NO: 9009 - DNA, 17 bp, Artificial Sequence
  Synthetic Polynucleotide
gtttgactaccaaaccg

SEQ ID NO: 9010 - DNA, 18 bp, Artificial Sequence
  Synthetic Polynucleotide
attgggtttagagtgtga

SEQ ID NO: 9011 - DNA, 18 bp, Artificial Sequence
  Synthetic Polynucleotide
atgggatttagagcagag

SEQ ID NO: 9012 - DNA, 17 bp, Artificial Sequence
  Synthetic Polynucleotide
gcgttgtatctttggga

SEQ ID NO: 9013 - DNA, 17 bp, Artificial Sequence
  Synthetic Polynucleotide
ttgttcagagtcctcct

SEQ ID NO: 9014 - DNA, 18 bp, Artificial Sequence
  Synthetic Polynucleotide
cattgatagcagcaagca

SEQ ID NO: 9015 - DNA, 17 bp, Artificial Sequence
  Synthetic Polynucleotide
ggtccagcaagagagcc

SEQ ID NO: 9016 - DNA, 17 bp, Artificial Sequence
  Synthetic Polynucleotide
cgcgtgagatgtcctga

SEQ ID NO: 9017 - DNA, 17 bp, Artificial Sequence
  Synthetic Polynucleotide
ggagcagcagaagtcta

SEQ ID NO: 9018 - DNA, 17 bp, Artificial Sequence
  Synthetic Polynucleotide
atgctcaaaggtaggct

SEQ ID NO: 9019 - DNA, 18 bp, Artificial Sequence
  Synthetic Polynucleotide
tgcatcaggaaactttgg

SEQ ID NO: 9020 - DNA, 18 bp, Artificial Sequence
  Synthetic Polynucleotide
tcattgaccaacccactg

SEQ ID NO: 9021 - DNA, 18 bp, Artificial Sequence
  Synthetic Polynucleotide
taaagtgaccaacaacca

SEQ ID NO: 9022 - DNA, 18 bp, Artificial Sequence
  Synthetic Polynucleotide
gggcttgaagtattttcc

SEQ ID NO: 9023 - DNA, 17 bp, Artificial Sequence
  Synthetic Polynucleotide
cggatttcccaggatat

SEQ ID NO: 9024 - DNA, 18 bp, Artificial Sequence
  Synthetic Polynucleotide
gcataagcacagatcttt

SEQ ID NO: 9025 - DNA, 18 bp, Artificial Sequence
  Synthetic Polynucleotide
cctgccatatttcaacga

SEQ ID NO: 9026 - DNA, 17 bp, Artificial Sequence
  Synthetic Polynucleotide
ctccaggttcacaggca

SEQ ID NO: 9027 - DNA, 18 bp, Artificial Sequence
  Synthetic Polynucleotide
aaagaggagcgtctgtct

SEQ ID NO: 9028 - DNA, 17 bp, Artificial Sequence
  Synthetic Polynucleotide
tccgatgagatgaacag

SEQ ID NO: 9029 - DNA, 18 bp, Artificial Sequence
  Synthetic Polynucleotide
agtttaattgcagcagct

SEQ ID NO: 9030 - DNA, 17 bp, Artificial Sequence
  Synthetic Polynucleotide
atacacccgtcagtctc

SEQ ID NO: 9031 - DNA, 17 bp, Artificial Sequence
  Synthetic Polynucleotide
cagaaagcatcccatgg

SEQ ID NO: 9032 - DNA, 17 bp, Artificial Sequence
  Synthetic Polynucleotide
ggcggaatattgacctg

SEQ ID NO: 9033 - DNA, 18 bp, Artificial Sequence
  Synthetic Polynucleotide
gagcaccaccagtaagaa

SEQ ID NO: 9034 - DNA, 18 bp, Artificial Sequence
  Synthetic Polynucleotide
agctcttggttagcgttt

SEQ ID NO: 9035 - DNA, 18 bp, Artificial Sequence
  Synthetic Polynucleotide
tgttctaggggagaacgt

SEQ ID NO: 9036 - DNA, 18 bp, Artificial Sequence
  Synthetic Polynucleotide
tgtgtccagttttcttta

SEQ ID NO: 9037 - DNA, 18 bp, Artificial Sequence
  Synthetic Polynucleotide
tgcacaacaccagaggaa

SEQ ID NO: 9038 - DNA, 17 bp, Artificial Sequence
  Synthetic Polynucleotide
tccattcgcacatccat

SEQ ID NO: 9039 - DNA, 17 bp, Artificial Sequence
  Synthetic Polynucleotide
aggcgaaaagacaaagg

SEQ ID NO: 9040 - DNA, 18 bp, Artificial Sequence
  Synthetic Polynucleotide
ggcataatgtccttcttc

SEQ ID NO: 9041 - DNA, 18 bp, Artificial Sequence
  Synthetic Polynucleotide
taaatcaggaagcagaaa

SEQ ID NO: 9042 - DNA, 17 bp, Artificial Sequence
  Synthetic Polynucleotide
tccatacaaccgtcagc

SEQ ID NO: 9043 - DNA, 18 bp, Artificial Sequence
  Synthetic Polynucleotide
atgccattcggtcttaaa

SEQ ID NO: 9044 - DNA, 18 bp, Artificial Sequence
  Synthetic Polynucleotide
tgcagcattgtatagagg

SEQ ID NO: 9045 - DNA, 18 bp, Artificial Sequence
  Synthetic Polynucleotide
acaacgtcttcaaaggga

SEQ ID NO: 9046 - DNA, 18 bp, Artificial Sequence
  Synthetic Polynucleotide
tgcgtcaagtagttagtt

SEQ ID NO: 9047 - DNA, 18 bp, Artificial Sequence
  Synthetic Polynucleotide
aagaaacctatcgtccga

SEQ ID NO: 9048 - DNA, 18 bp, Artificial Sequence
  Synthetic Polynucleotide
cttacatcatgacagcac

SEQ ID NO: 9049 - DNA, 18 bp, Artificial Sequence
  Synthetic Polynucleotide
tacacagtccaatccaat

SEQ ID NO: 9050 - DNA, 18 bp, Artificial Sequence
  Synthetic Polynucleotide
agccagtaggattccatt

SEQ ID NO: 9051 - DNA, 18 bp, Artificial Sequence
  Synthetic Polynucleotide
gggagaaaagaatgaacg

SEQ ID NO: 9052 - DNA, 18 bp, Artificial Sequence
  Synthetic Polynucleotide
cgaccatatgattgttcc

SEQ ID NO: 9053 - DNA, 18 bp, Artificial Sequence
  Synthetic Polynucleotide
tattcatattgcaccaga

SEQ ID NO: 9054 - DNA, 18 bp, Artificial Sequence
  Synthetic Polynucleotide
ccaacaccaacccacagt

SEQ ID NO: 9055 - DNA, 18 bp, Artificial Sequence
  Synthetic Polynucleotide
agtgaagcatcttccagt

SEQ ID NO: 9056 - DNA, 18 bp, Artificial Sequence
  Synthetic Polynucleotide
tttcttctgaccaactgt

SEQ ID NO: 9057 - DNA, 18 bp, Artificial Sequence
  Synthetic Polynucleotide
aacaaactctcaactcgc

SEQ ID NO: 9058 - DNA, 18 bp, Artificial Sequence
  Synthetic Polynucleotide
agaaattcaccatgccgg

SEQ ID NO: 9059 - DNA, 17 bp, Artificial Sequence
  Synthetic Polynucleotide
gcccaaacaaagcactg

SEQ ID NO: 9060 - DNA, 18 bp, Artificial Sequence
  Synthetic Polynucleotide
tagttcgactaggatcat

SEQ ID NO: 9061 - DNA, 18 bp, Artificial Sequence
  Synthetic Polynucleotide
cctttcccacaaggatta

SEQ ID NO: 9062 - DNA, 18 bp, Artificial Sequence
  Synthetic Polynucleotide
ttcctcgtccgatgactc

SEQ ID NO: 9063 - DNA, 18 bp, Artificial Sequence
  Synthetic Polynucleotide
gctcaggcaacccaaacg

SEQ ID NO: 9064 - DNA, 18 bp, Artificial Sequence
  Synthetic Polynucleotide
ttgtgagtccaattttga

SEQ ID NO: 9065 - DNA, 18 bp, Artificial Sequence
  Synthetic Polynucleotide
tacccaccatctaacagg

SEQ ID NO: 9066 - DNA, 18 bp, Artificial Sequence
  Synthetic Polynucleotide
cggcatctacctctgtac

SEQ ID NO: 9067 - DNA, 17 bp, Artificial Sequence
  Synthetic Polynucleotide
ctcagggtcacgaaacg

SEQ ID NO: 9068 - DNA, 17 bp, Artificial Sequence
  Synthetic Polynucleotide
cccaaccttagttgctc

SEQ ID NO: 9069 - DNA, 17 bp, Artificial Sequence
  Synthetic Polynucleotide
gtccatgctctccgcta

SEQ ID NO: 9070 - DNA, 17 bp, Artificial Sequence
  Synthetic Polynucleotide
ccaagcaagcccgccat

SEQ ID NO: 9071 - DNA, 18 bp, Artificial Sequence
  Synthetic Polynucleotide
acagtactaacacggata

SEQ ID NO: 9072 - DNA, 18 bp, Artificial Sequence
  Synthetic Polynucleotide
cgggatacacgctatggt

SEQ ID NO: 9073 - DNA, 18 bp, Artificial Sequence
  Synthetic Polynucleotide
gcggcacctcacagtgta

SEQ ID NO: 9074 - DNA, 18 bp, Artificial Sequence
  Synthetic Polynucleotide
gcacatgacagcaatgtt

SEQ ID NO: 9075 - DNA, 18 bp, Artificial Sequence
  Synthetic Polynucleotide
aacaggtccagtgaagtt

SEQ ID NO: 9076 - DNA, 17 bp, Artificial Sequence
  Synthetic Polynucleotide
tattgatgggatcagga

SEQ ID NO: 9077 - DNA, 18 bp, Artificial Sequence
  Synthetic Polynucleotide
cccttaaaatccagcaca

SEQ ID NO: 9078 - DNA, 17 bp, Artificial Sequence
  Synthetic Polynucleotide
ggaatgggaataccaga

SEQ ID NO: 9079 - DNA, 18 bp, Artificial Sequence
  Synthetic Polynucleotide
aattgagaacggtgttta

SEQ ID NO: 9080 - DNA, 18 bp, Artificial Sequence
  Synthetic Polynucleotide
acgaacagcactcagcat

SEQ ID NO: 9081 - DNA, 18 bp, Artificial Sequence
  Synthetic Polynucleotide
tctcagtagatcatccca

SEQ ID NO: 9082 - DNA, 17 bp, Artificial Sequence
  Synthetic Polynucleotide
ttttgaaagtgagcggg

SEQ ID NO: 9083 - DNA, 18 bp, Artificial Sequence
  Synthetic Polynucleotide
agtggcaaggagctgaaa

SEQ ID NO: 9084 - DNA, 17 bp, Artificial Sequence
  Synthetic Polynucleotide
gacagcggtatcgtaga

SEQ ID NO: 9085 - DNA, 17 bp, Artificial Sequence
  Synthetic Polynucleotide
actcgaaggtatgtcga

SEQ ID NO: 9086 - DNA, 18 bp, Artificial Sequence
  Synthetic Polynucleotide
taaccctacctttgaaga

SEQ ID NO: 9087 - DNA, 17 bp, Artificial Sequence
  Synthetic Polynucleotide
ggatcccactacaagga

SEQ ID NO: 9088 - DNA, 18 bp, Artificial Sequence
  Synthetic Polynucleotide
caaggaggactgtgaccc

SEQ ID NO: 9089 - DNA, 18 bp, Artificial Sequence
  Synthetic Polynucleotide
ctgtaccaggcatcgggg

SEQ ID NO: 9090 - DNA, 17 bp, Artificial Sequence
  Synthetic Polynucleotide
ttgcgggaagagccgtt

SEQ ID NO: 9091 - DNA, 17 bp, Artificial Sequence
  Synthetic Polynucleotide
gcagttgaggagtacca

SEQ ID NO: 9092 - DNA, 18 bp, Artificial Sequence
  Synthetic Polynucleotide
cttagcaacaaactgggt

SEQ ID NO: 9093 - DNA, 17 bp, Artificial Sequence
  Synthetic Polynucleotide
cgcaacgtgattggaag

SEQ ID NO: 9094 - DNA, 18 bp, Artificial Sequence
  Synthetic Polynucleotide
acataagtcgtcgggtac

SEQ ID NO: 9095 - DNA, 18 bp, Artificial Sequence
  Synthetic Polynucleotide
tcctgagtctgcgaaaga

SEQ ID NO: 9096 - DNA, 17 bp, Artificial Sequence
  Synthetic Polynucleotide
accgtcccaaacaagcc

SEQ ID NO: 9097 - DNA, 18 bp, Artificial Sequence
  Synthetic Polynucleotide
tcagatatgggcggggcc

SEQ ID NO: 9098 - DNA, 17 bp, Artificial Sequence
  Synthetic Polynucleotide
tcagaggcaagtctcga

SEQ ID NO: 9099 - DNA, 17 bp, Artificial Sequence
  Synthetic Polynucleotide
ctacgtcaagtatgggc

SEQ ID NO: 9100 - DNA, 17 bp, Artificial Sequence
  Synthetic Polynucleotide
cctcggggaacttcact

SEQ ID NO: 9101 - DNA, 18 bp, Artificial Sequence
  Synthetic Polynucleotide
cccaacaatccaaacccc

SEQ ID NO: 9102 - DNA, 18 bp, Artificial Sequence
  Synthetic Polynucleotide
ggagattcactcgtgttt

SEQ ID NO: 9103 - DNA, 17 bp, Artificial Sequence
  Synthetic Polynucleotide
cgaggaacagaagaggg

SEQ ID NO: 9104 - DNA, 17 bp, Artificial Sequence
  Synthetic Polynucleotide
ttaaccatagagcagcc

SEQ ID NO: 9105 - DNA, 18 bp, Artificial Sequence
  Synthetic Polynucleotide
gtgcgggagcatgtgtcc

SEQ ID NO: 9106 - DNA, 17 bp, Artificial Sequence
  Synthetic Polynucleotide
acttaccatgatcggta

SEQ ID NO: 9107 - DNA, 18 bp, Artificial Sequence
  Synthetic Polynucleotide
taaaactcgatccgacgt

SEQ ID NO: 9108 - DNA, 17 bp, Artificial Sequence
  Synthetic Polynucleotide
tagcgaaaacgactact

SEQ ID NO: 9109 - DNA, 17 bp, Artificial Sequence
  Synthetic Polynucleotide
ctctcagaccgcctctc

SEQ ID NO: 9110 - DNA, 17 bp, Artificial Sequence
  Synthetic Polynucleotide
cgaagagaaccgtgttt

SEQ ID NO: 9111 - DNA, 18 bp, Artificial Sequence
  Synthetic Polynucleotide
aaccatcttttctaccga

SEQ ID NO: 9112 - DNA, 17 bp, Artificial Sequence
  Synthetic Polynucleotide
tttacccgaggtctagt

SEQ ID NO: 9113 - DNA, 18 bp, Artificial Sequence
  Synthetic Polynucleotide
tttccaaggtccgtctca

SEQ ID NO: 9114 - DNA, 18 bp, Artificial Sequence
  Synthetic Polynucleotide
tagagtcatacacctgag

SEQ ID NO: 9115 - DNA, 18 bp, Artificial Sequence
  Synthetic Polynucleotide
aaggagcaatctcccgaa

SEQ ID NO: 9116 - DNA, 17 bp, Artificial Sequence
  Synthetic Polynucleotide
gtgtgtaattgttccgc

SEQ ID NO: 9117 - DNA, 17 bp, Artificial Sequence
  Synthetic Polynucleotide
ggcctccatcccaaagt

SEQ ID NO: 9118 - DNA, 18 bp, Artificial Sequence
  Synthetic Polynucleotide
gaactggatctccaaaca

SEQ ID NO: 9119 - DNA, 17 bp, Artificial Sequence
  Synthetic Polynucleotide
atgaacctccaaccata

SEQ ID NO: 9120 - DNA, 18 bp, Artificial Sequence
  Synthetic Polynucleotide
gaaagtcattccagctac

SEQ ID NO: 9121 - DNA, 17 bp, Artificial Sequence
  Synthetic Polynucleotide
aattagccctctgtctg

SEQ ID NO: 9122 - DNA, 17 bp, Artificial Sequence
  Synthetic Polynucleotide
gtgaaggaactgtctcc

SEQ ID NO: 9123 - DNA, 17 bp, Artificial Sequence
  Synthetic Polynucleotide
tgttcgacaaccaagtg

SEQ ID NO: 9124 - DNA, 18 bp, Artificial Sequence
  Synthetic Polynucleotide
ccagtcttacccgattta

SEQ ID NO: 9125 - DNA, 17 bp, Artificial Sequence
  Synthetic Polynucleotide
gtagcattcgaccaaac

SEQ ID NO: 9126 - DNA, 18 bp, Artificial Sequence
  Synthetic Polynucleotide
tcgaaaacgtacccgatg

SEQ ID NO: 9127 - DNA, 18 bp, Artificial Sequence
  Synthetic Polynucleotide
ccttgagtgaagtgacgt

SEQ ID NO: 9128 - DNA, 17 bp, Artificial Sequence
  Synthetic Polynucleotide
attcagcgtgcttttac

SEQ ID NO: 9129 - DNA, 17 bp, Artificial Sequence
  Synthetic Polynucleotide
aacttagaaagccccac

SEQ ID NO: 9130 - DNA, 17 bp, Artificial Sequence
  Synthetic Polynucleotide
agacatctctccaagcg

SEQ ID NO: 9131 - DNA, 17 bp, Artificial Sequence
  Synthetic Polynucleotide
gcctgatcttcaaatcg

SEQ ID NO: 9132 - DNA, 17 bp, Artificial Sequence
  Synthetic Polynucleotide
ggattctcagcaaaacc

SEQ ID NO: 9133 - DNA, 18 bp, Artificial Sequence
  Synthetic Polynucleotide
tagaagagccacctttcg

SEQ ID NO: 9134 - DNA, 17 bp, Artificial Sequence
  Synthetic Polynucleotide
gcgtaggtttaccaaag

SEQ ID NO: 9135 - DNA, 18 bp, Artificial Sequence
  Synthetic Polynucleotide
aagcttttatcagcgatc

SEQ ID NO: 9136 - DNA, 18 bp, Artificial Sequence
  Synthetic Polynucleotide
agactcgtaagtgcctgc

SEQ ID NO: 9137 - DNA, 18 bp, Artificial Sequence
  Synthetic Polynucleotide
atccatcttcaagcgact

SEQ ID NO: 9138 - DNA, 18 bp, Artificial Sequence
  Synthetic Polynucleotide
tccttacttctcgatctt

SEQ ID NO: 9139 - DNA, 18 bp, Artificial Sequence
  Synthetic Polynucleotide
gcatttgaccaccaagtt

SEQ ID NO: 9140 - DNA, 18 bp, Artificial Sequence
  Synthetic Polynucleotide
ctgttgatgaaatgccag

SEQ ID NO: 9141 - DNA, 18 bp, Artificial Sequence
  Synthetic Polynucleotide
ttggacaactcagtgccg

SEQ ID NO: 9142 - DNA, 17 bp, Artificial Sequence
  Synthetic Polynucleotide
tttcaatccccacccgc

SEQ ID NO: 9143 - DNA, 17 bp, Artificial Sequence
  Synthetic Polynucleotide
gccaacaaccgaaactg

SEQ ID NO: 9144 - DNA, 18 bp, Artificial Sequence
  Synthetic Polynucleotide
cgtgtccgtgatgcgatc

SEQ ID NO: 9145 - DNA, 17 bp, Artificial Sequence
  Synthetic Polynucleotide
tcaccaacatctgactt

SEQ ID NO: 9146 - DNA, 18 bp, Artificial Sequence
  Synthetic Polynucleotide
tgaaacccacatagagtg

SEQ ID NO: 9147 - DNA, 18 bp, Artificial Sequence
  Synthetic Polynucleotide
ttagcattcccagcttta

SEQ ID NO: 9148 - DNA, 18 bp, Artificial Sequence
  Synthetic Polynucleotide
agtgcatatcttcctgtg

SEQ ID NO: 9149 - DNA, 17 bp, Artificial Sequence
  Synthetic Polynucleotide
tcgaaatatcctttgcg

SEQ ID NO: 9150 - DNA, 18 bp, Artificial Sequence
  Synthetic Polynucleotide
agcgtgcaatagtgaatg

SEQ ID NO: 9151 - DNA, 18 bp, Artificial Sequence
  Synthetic Polynucleotide
tttccctttcccaatcaa

SEQ ID NO: 9152 - DNA, 17 bp, Artificial Sequence
  Synthetic Polynucleotide
tatcttccgaccatctt

SEQ ID NO: 9153 - DNA, 18 bp, Artificial Sequence
  Synthetic Polynucleotide
tttgtgtccaacatagca

SEQ ID NO: 9154 - DNA, 18 bp, Artificial Sequence
  Synthetic Polynucleotide
ccctggtgatctggagta

SEQ ID NO: 9155 - DNA, 18 bp, Artificial Sequence
  Synthetic Polynucleotide
cgctttaaatcacactcc

SEQ ID NO: 9156 - DNA, 18 bp, Artificial Sequence
  Synthetic Polynucleotide
aacaaacagctttcgttc

SEQ ID NO: 9157 - DNA, 18 bp, Artificial Sequence
  Synthetic Polynucleotide
aaacaacaatgctcgtta

SEQ ID NO: 9158 - DNA, 18 bp, Artificial Sequence
  Synthetic Polynucleotide
aagagaatatccatcccg

SEQ ID NO: 9159 - DNA, 18 bp, Artificial Sequence
  Synthetic Polynucleotide
acaacctccattgcagtg

SEQ ID NO: 9160 - DNA, 17 bp, Artificial Sequence
  Synthetic Polynucleotide
ccttaagaagcaacgct

SEQ ID NO: 9161 - DNA, 17 bp, Artificial Sequence
  Synthetic Polynucleotide
gcaaagagtgccgcagc

SEQ ID NO: 9162 - DNA, 17 bp, Artificial Sequence
  Synthetic Polynucleotide
ctccttccgccaaactg

SEQ ID NO: 9163 - DNA, 18 bp, Artificial Sequence
  Synthetic Polynucleotide
cctgggtctggtttagat

SEQ ID NO: 9164 - DNA, 17 bp, Artificial Sequence
  Synthetic Polynucleotide
tccgtatgggtctatgc

SEQ ID NO: 9165 - DNA, 17 bp, Artificial Sequence
  Synthetic Polynucleotide
ccggtcgtctggctact

SEQ ID NO: 9166 - DNA, 18 bp, Artificial Sequence
  Synthetic Polynucleotide
ctgcttgtgtaaatgagc

SEQ ID NO: 9167 - DNA, 17 bp, Artificial Sequence
  Synthetic Polynucleotide
tcgccacttaaaacata

SEQ ID NO: 9168 - DNA, 17 bp, Artificial Sequence
  Synthetic Polynucleotide
tcgacttatccatctga

SEQ ID NO: 9169 - DNA, 17 bp, Artificial Sequence
  Synthetic Polynucleotide
gcacaacctcaaagagg

SEQ ID NO: 9170 - DNA, 18 bp, Artificial Sequence
  Synthetic Polynucleotide
atgtctttcttctggtgg

SEQ ID NO: 9171 - DNA, 18 bp, Artificial Sequence
  Synthetic Polynucleotide
aagttcaaatctgacacg

SEQ ID NO: 9172 - DNA, 17 bp, Artificial Sequence
  Synthetic Polynucleotide
cggctttcaaagtgaaa

SEQ ID NO: 9173 - DNA, 17 bp, Artificial Sequence
  Synthetic Polynucleotide
acaaaggtcatggaacc

SEQ ID NO: 9174 - DNA, 18 bp, Artificial Sequence
  Synthetic Polynucleotide
gtctattgcagaattgcg

SEQ ID NO: 9175 - DNA, 17 bp, Artificial Sequence
  Synthetic Polynucleotide
ttcccgaggactatgca

SEQ ID NO: 9176 - DNA, 18 bp, Artificial Sequence
  Synthetic Polynucleotide
ggtgacttatggtgatga

SEQ ID NO: 9177 - DNA, 17 bp, Artificial Sequence
  Synthetic Polynucleotide
ggacaaacaacacactg

SEQ ID NO: 9178 - DNA, 18 bp, Artificial Sequence
  Synthetic Polynucleotide
tgagatgccctggtgctg

SEQ ID NO: 9179 - DNA, 18 bp, Artificial Sequence
  Synthetic Polynucleotide
tctatgccctcatcccct

SEQ ID NO: 9180 - DNA, 17 bp, Artificial Sequence
  Synthetic Polynucleotide
aagctttcgtaccctct

SEQ ID NO: 9181 - DNA, 18 bp, Artificial Sequence
  Synthetic Polynucleotide
cttccttccctgccattg

SEQ ID NO: 9182 - DNA, 17 bp, Artificial Sequence
  Synthetic Polynucleotide
ttcgtgctagaacatgg

SEQ ID NO: 9183 - DNA, 17 bp, Artificial Sequence
  Synthetic Polynucleotide
gctttattgccctgctc

SEQ ID NO: 9184 - DNA, 18 bp, Artificial Sequence
  Synthetic Polynucleotide
aacttctcctcaatgtga

SEQ ID NO: 9185 - DNA, 18 bp, Artificial Sequence
  Synthetic Polynucleotide
tgtccaagtttactaccc

SEQ ID NO: 9186 - DNA, 18 bp, Artificial Sequence
  Synthetic Polynucleotide
cagagacaagagtgccac

SEQ ID NO: 9187 - DNA, 18 bp, Artificial Sequence
  Synthetic Polynucleotide
ttccaataatccacagcg

SEQ ID NO: 9188 - DNA, 17 bp, Artificial Sequence
  Synthetic Polynucleotide
gagtcaatccgtactcg

SEQ ID NO: 9189 - DNA, 17 bp, Artificial Sequence
  Synthetic Polynucleotide
cctcaacctcagcaaat

SEQ ID NO: 9190 - DNA, 17 bp, Artificial Sequence
  Synthetic Polynucleotide
ggccaatatgcccaatt

SEQ ID NO: 9191 - DNA, 17 bp, Artificial Sequence
  Synthetic Polynucleotide
ggccaatcctattccac

SEQ ID NO: 9192 - DNA, 18 bp, Artificial Sequence
  Synthetic Polynucleotide
tttcaggagtttccacaa

SEQ ID NO: 9193 - DNA, 18 bp, Artificial Sequence
  Synthetic Polynucleotide
cccctaaaatatcggtga

SEQ ID NO: 9194 - DNA, 17 bp, Artificial Sequence
  Synthetic Polynucleotide
caaccccaatccttgtg

SEQ ID NO: 9195 - DNA, 17 bp, Artificial Sequence
  Synthetic Polynucleotide
actcgttaacctctccg

SEQ ID NO: 9196 - DNA, 18 bp, Artificial Sequence
  Synthetic Polynucleotide
taaaatctgggatcgtgt

SEQ ID NO: 9197 - DNA, 18 bp, Artificial Sequence
  Synthetic Polynucleotide
tatccgacatcagagagt

SEQ ID NO: 9198 - DNA, 18 bp, Artificial Sequence
  Synthetic Polynucleotide
caggtgacatggttcaga

SEQ ID NO: 9199 - DNA, 18 bp, Artificial Sequence
  Synthetic Polynucleotide
ttgtttccctttctcacc

SEQ ID NO: 9200 - DNA, 18 bp, Artificial Sequence
  Synthetic Polynucleotide
tccgttagattcagtgct

SEQ ID NO: 9201 - DNA, 17 bp, Artificial Sequence
  Synthetic Polynucleotide
agcgttcgtgatgtagc

SEQ ID NO: 9202 - DNA, 18 bp, Artificial Sequence
  Synthetic Polynucleotide
tggaaagtgaacttgtca

SEQ ID NO: 9203 - DNA, 17 bp, Artificial Sequence
  Synthetic Polynucleotide
aagcagtagttgcatca

SEQ ID NO: 9204 - DNA, 17 bp, Artificial Sequence
  Synthetic Polynucleotide
tgtgatcgtgctatgcc

SEQ ID NO: 9205 - DNA, 18 bp, Artificial Sequence
  Synthetic Polynucleotide
gaagccgagaccgtattt

SEQ ID NO: 9206 - DNA, 18 bp, Artificial Sequence
  Synthetic Polynucleotide
tctctgccagtgacgtgt

SEQ ID NO: 9207 - DNA, 18 bp, Artificial Sequence
  Synthetic Polynucleotide
agttgtaccaccaggttt

SEQ ID NO: 9208 - DNA, 18 bp, Artificial Sequence
  Synthetic Polynucleotide
ggactatcctaagtgtga

SEQ ID NO: 9209 - DNA, 18 bp, Artificial Sequence
  Synthetic Polynucleotide
tagaatgatagccacaag

SEQ ID NO: 9210 - DNA, 18 bp, Artificial Sequence
  Synthetic Polynucleotide
catgttggctaaaatggg

SEQ ID NO: 9211 - DNA, 17 bp, Artificial Sequence
  Synthetic Polynucleotide
taaacccagtcctcagg

SEQ ID NO: 9212 - DNA, 18 bp, Artificial Sequence
  Synthetic Polynucleotide
tggacatttggaaaacga

SEQ ID NO: 9213 - DNA, 18 bp, Artificial Sequence
  Synthetic Polynucleotide
tgacactacccttgtagt

SEQ ID NO: 9214 - DNA, 18 bp, Artificial Sequence
  Synthetic Polynucleotide
taggtgtagtcgtattgt

SEQ ID NO: 9215 - DNA, 17 bp, Artificial Sequence
  Synthetic Polynucleotide
gcagcaaaacagtatga

SEQ ID NO: 9216 - DNA, 17 bp, Artificial Sequence
  Synthetic Polynucleotide
tgcatttgtttcccaag

SEQ ID NO: 9217 - DNA, 17 bp, Artificial Sequence
  Synthetic Polynucleotide
atcgctctacaatccag

SEQ ID NO: 9218 - DNA, 18 bp, Artificial Sequence
  Synthetic Polynucleotide
cagccttcctccggttcc

SEQ ID NO: 9219 - DNA, 18 bp, Artificial Sequence
  Synthetic Polynucleotide
gtggtcatagaggtagcc

SEQ ID NO: 9220 - DNA, 17 bp, Artificial Sequence
  Synthetic Polynucleotide
cagaactccgtcctata

SEQ ID NO: 9221 - DNA, 17 bp, Artificial Sequence
  Synthetic Polynucleotide
ttcttttcatccgcagt

SEQ ID NO: 9222 - DNA, 18 bp, Artificial Sequence
  Synthetic Polynucleotide
tgaagtcttttcaccaca

SEQ ID NO: 9223 - DNA, 18 bp, Artificial Sequence
  Synthetic Polynucleotide
tctctctagatgttgcac

SEQ ID NO: 9224 - DNA, 18 bp, Artificial Sequence
  Synthetic Polynucleotide
cttacagctcttgaaacc

SEQ ID NO: 9225 - DNA, 18 bp, Artificial Sequence
  Synthetic Polynucleotide
gtttcggcaaattcaccc

SEQ ID NO: 9226 - DNA, 18 bp, Artificial Sequence
  Synthetic Polynucleotide
gtgtaaatcgtgactcgt

SEQ ID NO: 9227 - DNA, 18 bp, Artificial Sequence
  Synthetic Polynucleotide
gaacacatggtccaccgg

SEQ ID NO: 9228 - DNA, 18 bp, Artificial Sequence
  Synthetic Polynucleotide
tggtgaacgccatgacct

SEQ ID NO: 9229 - DNA, 17 bp, Artificial Sequence
  Synthetic Polynucleotide
ccgtgatgccaacgacg

SEQ ID NO: 9230 - DNA, 18 bp, Artificial Sequence
  Synthetic Polynucleotide
ctcgccagatagcaaaac

SEQ ID NO: 9231 - DNA, 18 bp, Artificial Sequence
  Synthetic Polynucleotide
tccagttcaatgatccgc

SEQ ID NO: 9232 - DNA, 17 bp, Artificial Sequence
  Synthetic Polynucleotide
gcattgttcttcgtgct

SEQ ID NO: 9233 - DNA, 18 bp, Artificial Sequence
  Synthetic Polynucleotide
agcaagagcagtaccgtt

SEQ ID NO: 9234 - DNA, 17 bp, Artificial Sequence
  Synthetic Polynucleotide
gctagccgtatttccgg

SEQ ID NO: 9235 - DNA, 18 bp, Artificial Sequence
  Synthetic Polynucleotide
ccgacaaccacatgcagt

SEQ ID NO: 9236 - DNA, 17 bp, Artificial Sequence
  Synthetic Polynucleotide
atcttggagatcaaccc

SEQ ID NO: 9237 - DNA, 17 bp, Artificial Sequence
  Synthetic Polynucleotide
cgtcttgatgacgacag

SEQ ID NO: 9238 - DNA, 18 bp, Artificial Sequence
  Synthetic Polynucleotide
tgcctgtccgatctactc

SEQ ID NO: 9239 - DNA, 18 bp, Artificial Sequence
  Synthetic Polynucleotide
tgtgagttaccaacccgg

SEQ ID NO: 9240 - DNA, 17 bp, Artificial Sequence
  Synthetic Polynucleotide
gggtttctgttcctctc

SEQ ID NO: 9241 - DNA, 17 bp, Artificial Sequence
  Synthetic Polynucleotide
cgacgctatgactacgc

SEQ ID NO: 9242 - DNA, 17 bp, Artificial Sequence
  Synthetic Polynucleotide
aacaccgatttcaacgt

SEQ ID NO: 9243 - DNA, 17 bp, Artificial Sequence
  Synthetic Polynucleotide
agatgtatcccgactga

SEQ ID NO: 9244 - DNA, 17 bp, Artificial Sequence
  Synthetic Polynucleotide
gttgtccagccccttca

SEQ ID NO: 9245 - DNA, 17 bp, Artificial Sequence
  Synthetic Polynucleotide
caagagcccaattcccg

SEQ ID NO: 9246 - DNA, 17 bp, Artificial Sequence
  Synthetic Polynucleotide
catcgctgaagagactg

SEQ ID NO: 9247 - DNA, 17 bp, Artificial Sequence
  Synthetic Polynucleotide
agacctgcccagacgag

SEQ ID NO: 9248 - DNA, 18 bp, Artificial Sequence
  Synthetic Polynucleotide
cgctttatcgcagctcgc

SEQ ID NO: 9249 - DNA, 18 bp, Artificial Sequence
  Synthetic Polynucleotide
catgatttcgatgtccgg

SEQ ID NO: 9250 - DNA, 17 bp, Artificial Sequence
  Synthetic Polynucleotide
accgcttccgccaactt

SEQ ID NO: 9251 - DNA, 17 bp, Artificial Sequence
  Synthetic Polynucleotide
ctgtgcgtatcatccat

SEQ ID NO: 9252 - DNA, 18 bp, Artificial Sequence
  Synthetic Polynucleotide
atgatgtggaaactccaa

SEQ ID NO: 9253 - DNA, 18 bp, Artificial Sequence
  Synthetic Polynucleotide
tcaactacagcactttcg

SEQ ID NO: 9254 - DNA, 18 bp, Artificial Sequence
  Synthetic Polynucleotide
gcgcctacgtgtccgaaa

SEQ ID NO: 9255 - DNA, 18 bp, Artificial Sequence
  Synthetic Polynucleotide
agcgaatgttgaatttgc

SEQ ID NO: 9256 - DNA, 18 bp, Artificial Sequence
  Synthetic Polynucleotide
ttgaattgcagtaccgcc

SEQ ID NO: 9257 - DNA, 18 bp, Artificial Sequence
  Synthetic Polynucleotide
ggcttcatacacacttcc

SEQ ID NO: 9258 - DNA, 18 bp, Artificial Sequence
  Synthetic Polynucleotide
gtgcgtgatgaccaatct

SEQ ID NO: 9259 - DNA, 18 bp, Artificial Sequence
  Synthetic Polynucleotide
ggtatagaacatcccgaa

SEQ ID NO: 9260 - DNA, 18 bp, Artificial Sequence
  Synthetic Polynucleotide
attgttcttcaatggtgc

SEQ ID NO: 9261 - DNA, 18 bp, Artificial Sequence
  Synthetic Polynucleotide
aggcacttatcataagca

SEQ ID NO: 9262 - DNA, 18 bp, Artificial Sequence
  Synthetic Polynucleotide
actaggttgtggctatcg

SEQ ID NO: 9263 - DNA, 17 bp, Artificial Sequence
  Synthetic Polynucleotide
gcaatacgttcccaatc

SEQ ID NO: 9264 - DNA, 17 bp, Artificial Sequence
  Synthetic Polynucleotide
aaagaaatgctccaggt

SEQ ID NO: 9265 - DNA, 18 bp, Artificial Sequence
  Synthetic Polynucleotide
aaggtttgactgttggaa

SEQ ID NO: 9266 - DNA, 18 bp, Artificial Sequence
  Synthetic Polynucleotide
tacccaactgtattacct

SEQ ID NO: 9267 - DNA, 17 bp, Artificial Sequence
  Synthetic Polynucleotide
taatttgctcgtccaaa

SEQ ID NO: 9268 - DNA, 17 bp, Artificial Sequence
  Synthetic Polynucleotide
tcaggccgaagtactcc

SEQ ID NO: 9269 - DNA, 18 bp, Artificial Sequence
  Synthetic Polynucleotide
tctcccactcttgtttcg

SEQ ID NO: 9270 - DNA, 17 bp, Artificial Sequence
  Synthetic Polynucleotide
tatttgaccgctcctta

SEQ ID NO: 9271 - DNA, 18 bp, Artificial Sequence
  Synthetic Polynucleotide
tacacttcttgatcctca

SEQ ID NO: 9272 - DNA, 17 bp, Artificial Sequence
  Synthetic Polynucleotide
gcgttgcatacaatagg

SEQ ID NO: 9273 - DNA, 18 bp, Artificial Sequence
  Synthetic Polynucleotide
tgccaagtccatctcatc

SEQ ID NO: 9274 - DNA, 17 bp, Artificial Sequence
  Synthetic Polynucleotide
tctgggctaccaatatt

SEQ ID NO: 9275 - DNA, 17 bp, Artificial Sequence
  Synthetic Polynucleotide
gagggttttgaccttga

SEQ ID NO: 9276 - DNA, 17 bp, Artificial Sequence
  Synthetic Polynucleotide
ctggaaaatccttgctg

SEQ ID NO: 9277 - DNA, 17 bp, Artificial Sequence
  Synthetic Polynucleotide
tattgttggagttgctt

SEQ ID NO: 9278 - DNA, 17 bp, Artificial Sequence
  Synthetic Polynucleotide
ggacacatgatggtgat

SEQ ID NO: 9279 - DNA, 18 bp, Artificial Sequence
  Synthetic Polynucleotide
agttggacacatgatggt

SEQ ID NO: 9280 - DNA, 17 bp, Artificial Sequence
  Synthetic Polynucleotide
agcaggatctctggtct

SEQ ID NO: 9281 - DNA, 18 bp, Artificial Sequence
  Synthetic Polynucleotide
ggttagaggagacccctc

SEQ ID NO: 9282 - DNA, 18 bp, Artificial Sequence
  Synthetic Polynucleotide
tatcaggcagtaccacaa

SEQ ID NO: 9283 - DNA, 17 bp, Artificial Sequence
  Synthetic Polynucleotide
gagagccatagtggtct

SEQ ID NO: 9284 - DNA, 18 bp, Artificial Sequence
  Synthetic Polynucleotide
aggtgtcaatatgctgtt

SEQ ID NO: 9285 - DNA, 17 bp, Artificial Sequence
  Synthetic Polynucleotide
agaggttagaggagacc

SEQ ID NO: 9286 - DNA, 17 bp, Artificial Sequence
  Synthetic Polynucleotide
caactccatgtgccatg

SEQ ID NO: 9287 - DNA, 17 bp, Artificial Sequence
  Synthetic Polynucleotide
cctgagtacaggacagt

SEQ ID NO: 9288 - DNA, 17 bp, Artificial Sequence
  Synthetic Polynucleotide
ttcagtccaatcaagga

SEQ ID NO: 9289 - DNA, 18 bp, Artificial Sequence
  Synthetic Polynucleotide
gtgcgagctgtttcttag

SEQ ID NO: 9290 - DNA, 17 bp, Artificial Sequence
  Synthetic Polynucleotide
catgcccttagtaggac

SEQ ID NO: 9291 - DNA, 17 bp, Artificial Sequence
  Synthetic Polynucleotide
gggacagttgtattcca

SEQ ID NO: 9292 - DNA, 17 bp, Artificial Sequence
  Synthetic Polynucleotide
attgaggtgcattggtc

SEQ ID NO: 9293 - DNA, 18 bp, Artificial Sequence
  Synthetic Polynucleotide
agggagaacaagaaccgc

SEQ ID NO: 9294 - DNA, 18 bp, Artificial Sequence
  Synthetic Polynucleotide
gggaagagagaaattggc

SEQ ID NO: 9295 - DNA, 17 bp, Artificial Sequence
  Synthetic Polynucleotide
tcgacaagcgtgggtgg

SEQ ID NO: 9296 - DNA, 18 bp, Artificial Sequence
  Synthetic Polynucleotide
tcgtcgttaaaccgagcc

SEQ ID NO: 9297 - DNA, 17 bp, Artificial Sequence
  Synthetic Polynucleotide
ccattttctggcgttct

SEQ ID NO: 9298 - DNA, 18 bp, Artificial Sequence
  Synthetic Polynucleotide
ctgtgagccccgtccaag

SEQ ID NO: 9299 - DNA, 17 bp, Artificial Sequence
  Synthetic Polynucleotide
cctatcaggcagtacca

SEQ ID NO: 9300 - DNA, 17 bp, Artificial Sequence
  Synthetic Polynucleotide
cagaaagcgtctagcca

SEQ ID NO: 9301 - DNA, 18 bp, Artificial Sequence
  Synthetic Polynucleotide
tccctttcgagctaactc

SEQ ID NO: 9302 - DNA, 18 bp, Artificial Sequence
  Synthetic Polynucleotide
cgagtattcagtgcaaat

SEQ ID NO: 9303 - DNA, 17 bp, Artificial Sequence
  Synthetic Polynucleotide
atgatgagtcttgagcc

SEQ ID NO: 9304 - DNA, 18 bp, Artificial Sequence
  Synthetic Polynucleotide
tgagaaggaaaagttgca

SEQ ID NO: 9305 - DNA, 18 bp, Artificial Sequence
  Synthetic Polynucleotide
tttgtcatccaaaggtct

SEQ ID NO: 9306 - DNA, 18 bp, Artificial Sequence
  Synthetic Polynucleotide
gaggttagaggagaccct

SEQ ID NO: 9307 - DNA, 18 bp, Artificial Sequence
  Synthetic Polynucleotide
ggggaatttggtataggg

SEQ ID NO: 9308 - DNA, 18 bp, Artificial Sequence
  Synthetic Polynucleotide
tcaaagacagaatgtgag

SEQ ID NO: 9309 - DNA, 17 bp, Artificial Sequence
  Synthetic Polynucleotide
ccattgccgtacagacc

SEQ ID NO: 9310 - DNA, 17 bp, Artificial Sequence
  Synthetic Polynucleotide
aaggaaggcgtataccg

SEQ ID NO: 9311 - DNA, 17 bp, Artificial Sequence
  Synthetic Polynucleotide
gtgcttcatccatgatg

SEQ ID NO: 9312 - DNA, 18 bp, Artificial Sequence
  Synthetic Polynucleotide
acggaaaagtgcaggtga

SEQ ID NO: 9313 - DNA, 17 bp, Artificial Sequence
  Synthetic Polynucleotide
cagttcaatagcccagg

SEQ ID NO: 9314 - DNA, 17 bp, Artificial Sequence
  Synthetic Polynucleotide
gaaagcgagcccctaac

SEQ ID NO: 9315 - DNA, 18 bp, Artificial Sequence
  Synthetic Polynucleotide
gaatgttgagcaagccct

SEQ ID NO: 9316 - DNA, 18 bp, Artificial Sequence
  Synthetic Polynucleotide
ctctaaaaggcccgtctg

SEQ ID NO: 9317 - DNA, 18 bp, Artificial Sequence
  Synthetic Polynucleotide
tagatgaatcccaggaag

SEQ ID NO: 9318 - DNA, 17 bp, Artificial Sequence
  Synthetic Polynucleotide
ccctcgtcacacaagat

SEQ ID NO: 9319 - DNA, 17 bp, Artificial Sequence
  Synthetic Polynucleotide
gtgtgaatggtgtgatg

SEQ ID NO: 9320 - DNA, 17 bp, Artificial Sequence
  Synthetic Polynucleotide
gcagaagtacccgtatg

SEQ ID NO: 9321 - DNA, 17 bp, Artificial Sequence
  Synthetic Polynucleotide
ggtagagttaaggtggg

SEQ ID NO: 9322 - DNA, 18 bp, Artificial Sequence
  Synthetic Polynucleotide
tccagtagcagtccaact

SEQ ID NO: 9323 - DNA, 18 bp, Artificial Sequence
  Synthetic Polynucleotide
cagcttaggagaacaaga

SEQ ID NO: 9324 - DNA, 17 bp, Artificial Sequence
  Synthetic Polynucleotide
tccatccaaaacatgcc

SEQ ID NO: 9325 - DNA, 17 bp, Artificial Sequence
  Synthetic Polynucleotide
tctgacaaggttatccg

SEQ ID NO: 9326 - DNA, 17 bp, Artificial Sequence
  Synthetic Polynucleotide
tcagtgcgtatggtgat

SEQ ID NO: 9327 - DNA, 18 bp, Artificial Sequence
  Synthetic Polynucleotide
cgtcaatatgctaaagcg

SEQ ID NO: 9328 - DNA, 17 bp, Artificial Sequence
  Synthetic Polynucleotide
aaggtgagaatcaagga

SEQ ID NO: 9329 - DNA, 18 bp, Artificial Sequence
  Synthetic Polynucleotide
agaggttagaggagaccc

SEQ ID NO: 9330 - DNA, 18 bp, Artificial Sequence
  Synthetic Polynucleotide
accatcagagtgaacatt

SEQ ID NO: 9331 - DNA, 17 bp, Artificial Sequence
  Synthetic Polynucleotide
ccccatttcattggccg

SEQ ID NO: 9332 - DNA, 17 bp, Artificial Sequence
  Synthetic Polynucleotide
ccatccaggacaaccag

SEQ ID NO: 9333 - DNA, 18 bp, Artificial Sequence
  Synthetic Polynucleotide
cgtttccaatcgtgatca

SEQ ID NO: 9334 - DNA, 17 bp, Artificial Sequence
  Synthetic Polynucleotide
gggaaccaagaaggatc

SEQ ID NO: 9335 - DNA, 18 bp, Artificial Sequence
  Synthetic Polynucleotide
tgtcgtaacaagcaggaa

SEQ ID NO: 9336 - DNA, 17 bp, Artificial Sequence
  Synthetic Polynucleotide
ggtatatccatcaggcc

SEQ ID NO: 9337 - DNA, 17 bp, Artificial Sequence
  Synthetic Polynucleotide
agagagcgtccatcttt

SEQ ID NO: 9338 - DNA, 18 bp, Artificial Sequence
  Synthetic Polynucleotide
caggtgaggtaaaagtgg

SEQ ID NO: 9339 - DNA, 18 bp, Artificial Sequence
  Synthetic Polynucleotide
cttctttcgtcaaccgat

SEQ ID NO: 9340 - DNA, 17 bp, Artificial Sequence
  Synthetic Polynucleotide
ccgtgatgcagaagaag

SEQ ID NO: 9341 - DNA, 17 bp, Artificial Sequence
  Synthetic Polynucleotide
ccattgagcgaacaaga

SEQ ID NO: 9342 - DNA, 18 bp, Artificial Sequence
  Synthetic Polynucleotide
gtatgcagaacaggtgaa

SEQ ID NO: 9343 - DNA, 17 bp, Artificial Sequence
  Synthetic Polynucleotide
gcgtgcgatgtgtcatt

SEQ ID NO: 9344 - DNA, 18 bp, Artificial Sequence
  Synthetic Polynucleotide
tgaatgtgaggtgtcaaa

SEQ ID NO: 9345 - DNA, 17 bp, Artificial Sequence
  Synthetic Polynucleotide
caatcccgtgatcattg

SEQ ID NO: 9346 - DNA, 17 bp, Artificial Sequence
  Synthetic Polynucleotide
gaggatctggtcaagtt

SEQ ID NO: 9347 - DNA, 18 bp, Artificial Sequence
  Synthetic Polynucleotide
taaagtccacagttaggt

SEQ ID NO: 9348 - DNA, 18 bp, Artificial Sequence
  Synthetic Polynucleotide
aggtagaattgagatgcc

SEQ ID NO: 9349 - DNA, 18 bp, Artificial Sequence
  Synthetic Polynucleotide
ggatgtttcatagcgtac

SEQ ID NO: 9350 - DNA, 18 bp, Artificial Sequence
  Synthetic Polynucleotide
agctgttaaggagcccga

SEQ ID NO: 9351 - DNA, 17 bp, Artificial Sequence
  Synthetic Polynucleotide
tgagtcattaaaggccg

SEQ ID NO: 9352 - DNA, 17 bp, Artificial Sequence
  Synthetic Polynucleotide
ccagtgaacacaaggtc

SEQ ID NO: 9353 - DNA, 18 bp, Artificial Sequence
  Synthetic Polynucleotide
atcgtgaattgagtttcc

SEQ ID NO: 9354 - DNA, 18 bp, Artificial Sequence
  Synthetic Polynucleotide
atcaggaggaacttatgg

SEQ ID NO: 9355 - DNA, 18 bp, Artificial Sequence
  Synthetic Polynucleotide
cctagaataatttggcgc

SEQ ID NO: 9356 - DNA, 17 bp, Artificial Sequence
  Synthetic Polynucleotide
ttctcatgtcaacgtgg

SEQ ID NO: 9357 - DNA, 18 bp, Artificial Sequence
  Synthetic Polynucleotide
cagtttatgcccgtagaa

SEQ ID NO: 9358 - DNA, 17 bp, Artificial Sequence
  Synthetic Polynucleotide
acaagtgaagtcggagg

SEQ ID NO: 9359 - DNA, 18 bp, Artificial Sequence
  Synthetic Polynucleotide
ctgtcaatcccgaagtcc

SEQ ID NO: 9360 - DNA, 17 bp, Artificial Sequence
  Synthetic Polynucleotide
gtcatatccaggaccga

SEQ ID NO: 9361 - DNA, 17 bp, Artificial Sequence
  Synthetic Polynucleotide
gctttgaggtatggtgt

SEQ ID NO: 9362 - DNA, 17 bp, Artificial Sequence
  Synthetic Polynucleotide
gagtccaacaatgaagc

SEQ ID NO: 9363 - DNA, 18 bp, Artificial Sequence
  Synthetic Polynucleotide
atgggtcatccatctata

SEQ ID NO: 9364 - DNA, 17 bp, Artificial Sequence
  Synthetic Polynucleotide
ctcttcgggtacatcgc

SEQ ID NO: 9365 - DNA, 17 bp, Artificial Sequence
  Synthetic Polynucleotide
tctgagaagcaggtggt

SEQ ID NO: 9366 - DNA, 17 bp, Artificial Sequence
  Synthetic Polynucleotide
cacaactgcaagaagcc

SEQ ID NO: 9367 - DNA, 17 bp, Artificial Sequence
  Synthetic Polynucleotide
acccagccttgaaatcg

SEQ ID NO: 9368 - DNA, 17 bp, Artificial Sequence
  Synthetic Polynucleotide
ggccaagaaaggattta

SEQ ID NO: 9369 - DNA, 18 bp, Artificial Sequence
  Synthetic Polynucleotide
tgagactttaccgctgtg

SEQ ID NO: 9370 - DNA, 18 bp, Artificial Sequence
  Synthetic Polynucleotide
tccaaattaagctcactg

SEQ ID NO: 9371 - DNA, 17 bp, Artificial Sequence
  Synthetic Polynucleotide
ttgaacaagaaggtgct

SEQ ID NO: 9372 - DNA, 17 bp, Artificial Sequence
  Synthetic Polynucleotide
gactatgaagccttcga

SEQ ID NO: 9373 - DNA, 18 bp, Artificial Sequence
  Synthetic Polynucleotide
gcagccaaacaactagag

SEQ ID NO: 9374 - DNA, 17 bp, Artificial Sequence
  Synthetic Polynucleotide
tgtgtcctgatgccact

SEQ ID NO: 9375 - DNA, 17 bp, Artificial Sequence
  Synthetic Polynucleotide
acagagtccgtgtaaac

SEQ ID NO: 9376 - DNA, 17 bp, Artificial Sequence
  Synthetic Polynucleotide
tagccaaaccgacgttc

SEQ ID NO: 9377 - DNA, 18 bp, Artificial Sequence
  Synthetic Polynucleotide
ggctagaaattgaaaccc

SEQ ID NO: 9378 - DNA, 17 bp, Artificial Sequence
  Synthetic Polynucleotide
atcgtccgcaatcatcg

SEQ ID NO: 9379 - DNA, 17 bp, Artificial Sequence
  Synthetic Polynucleotide
gaagtgcctgtgcaact

SEQ ID NO: 9380 - DNA, 18 bp, Artificial Sequence
  Synthetic Polynucleotide
gttgctgagaactacgct

SEQ ID NO: 9381 - DNA, 18 bp, Artificial Sequence
  Synthetic Polynucleotide
tctcctgaacctactaag

SEQ ID NO: 9382 - DNA, 17 bp, Artificial Sequence
  Synthetic Polynucleotide
ctgccagagtgactatg

SEQ ID NO: 9383 - DNA, 18 bp, Artificial Sequence
  Synthetic Polynucleotide
accgtcagaagttccttt

SEQ ID NO: 9384 - DNA, 18 bp, Artificial Sequence
  Synthetic Polynucleotide
agagaggatttaggtccc

SEQ ID NO: 9385 - DNA, 17 bp, Artificial Sequence
  Synthetic Polynucleotide
gcccattcccctttgat

SEQ ID NO: 9386 - DNA, 17 bp, Artificial Sequence
  Synthetic Polynucleotide
tacgccaatgactacac

SEQ ID NO: 9387 - DNA, 17 bp, Artificial Sequence
  Synthetic Polynucleotide
acgtccagaaccctgta

SEQ ID NO: 9388 - DNA, 17 bp, Artificial Sequence
  Synthetic Polynucleotide
acgtgccgacatacttg

SEQ ID NO: 9389 - DNA, 18 bp, Artificial Sequence
  Synthetic Polynucleotide
agtgatccgttgatgagt

SEQ ID NO: 9390 - DNA, 18 bp, Artificial Sequence
  Synthetic Polynucleotide
agcttttccaacatcaac

SEQ ID NO: 9391 - DNA, 17 bp, Artificial Sequence
  Synthetic Polynucleotide
ctgcaatcgcttagaag

SEQ ID NO: 9392 - DNA, 17 bp, Artificial Sequence
  Synthetic Polynucleotide
gcctcccaagatcaata

SEQ ID NO: 9393 - DNA, 17 bp, Artificial Sequence
  Synthetic Polynucleotide
agccactatccaggttg

SEQ ID NO: 9394 - DNA, 18 bp, Artificial Sequence
  Synthetic Polynucleotide
cgcctacaaattaggtga

SEQ ID NO: 9395 - DNA, 17 bp, Artificial Sequence
  Synthetic Polynucleotide
ggtgccatagagcatga

SEQ ID NO: 9396 - DNA, 18 bp, Artificial Sequence
  Synthetic Polynucleotide
aaagagcagccagatttc

SEQ ID NO: 9397 - DNA, 17 bp, Artificial Sequence
  Synthetic Polynucleotide
tgctcctccagaaattt

SEQ ID NO: 9398 - DNA, 17 bp, Artificial Sequence
  Synthetic Polynucleotide
actttcgacgcaaacac

SEQ ID NO: 9399 - DNA, 18 bp, Artificial Sequence
  Synthetic Polynucleotide
tattccatgaggtgtgag

SEQ ID NO: 9400 - DNA, 17 bp, Artificial Sequence
  Synthetic Polynucleotide
acacatccgactacaca

SEQ ID NO: 9401 - DNA, 17 bp, Artificial Sequence
  Synthetic Polynucleotide
tccagagccctgtaaac

SEQ ID NO: 9402 - DNA, 17 bp, Artificial Sequence
  Synthetic Polynucleotide
ggtctttccgcaaatca

SEQ ID NO: 9403 - DNA, 17 bp, Artificial Sequence
  Synthetic Polynucleotide
cccaacttagagcccaa

SEQ ID NO: 9404 - DNA, 17 bp, Artificial Sequence
  Synthetic Polynucleotide
tcacaagacgcctatat

SEQ ID NO: 9405 - DNA, 17 bp, Artificial Sequence
  Synthetic Polynucleotide
tcaagtttctcccagaa

SEQ ID NO: 9406 - DNA, 17 bp, Artificial Sequence
  Synthetic Polynucleotide
gccagagaagatcaaga

SEQ ID NO: 9407 - DNA, 18 bp, Artificial Sequence
  Synthetic Polynucleotide
ctctaaacttccccaagg

SEQ ID NO: 9408 - DNA, 17 bp, Artificial Sequence
  Synthetic Polynucleotide
cgaacagtcctgaaaac

SEQ ID NO: 9409 - DNA, 18 bp, Artificial Sequence
  Synthetic Polynucleotide
ttcattaagtccgtcagc

SEQ ID NO: 9410 - DNA, 17 bp, Artificial Sequence
  Synthetic Polynucleotide
tttcccacttttcgaga

SEQ ID NO: 9411 - DNA, 18 bp, Artificial Sequence
  Synthetic Polynucleotide
caagaaaggtatgcaacc

SEQ ID NO: 9412 - DNA, 17 bp, Artificial Sequence
  Synthetic Polynucleotide
tttcgctttgagaacct

SEQ ID NO: 9413 - DNA, 17 bp, Artificial Sequence
  Synthetic Polynucleotide
tttctgaagtcccagtg

SEQ ID NO: 9414 - DNA, 17 bp, Artificial Sequence
  Synthetic Polynucleotide
gttattatccagccgca

SEQ ID NO: 9415 - DNA, 18 bp, Artificial Sequence
  Synthetic Polynucleotide
ggccagactatcgcatcc

SEQ ID NO: 9416 - DNA, 18 bp, Artificial Sequence
  Synthetic Polynucleotide
accctatagccagtcttc

SEQ ID NO: 9417 - DNA, 18 bp, Artificial Sequence
  Synthetic Polynucleotide
tggtggtgatgaatgata

SEQ ID NO: 9418 - DNA, 17 bp, Artificial Sequence
  Synthetic Polynucleotide
gttttctcgtccctgta

SEQ ID NO: 9419 - DNA, 18 bp, Artificial Sequence
  Synthetic Polynucleotide
tttggtgccatctactat

SEQ ID NO: 9420 - DNA, 18 bp, Artificial Sequence
  Synthetic Polynucleotide
atagcccattcgacgttc

SEQ ID NO: 9421 - DNA, 18 bp, Artificial Sequence
  Synthetic Polynucleotide
cccagaatgcaagatcaa

SEQ ID NO: 9422 - DNA, 17 bp, Artificial Sequence
  Synthetic Polynucleotide
gtgccatagagcatgac

SEQ ID NO: 9423 - DNA, 18 bp, Artificial Sequence
  Synthetic Polynucleotide
cgactccaacaagattca

SEQ ID NO: 9424 - DNA, 17 bp, Artificial Sequence
  Synthetic Polynucleotide
cagtgcccttatgcctg

SEQ ID NO: 9425 - DNA, 18 bp, Artificial Sequence
  Synthetic Polynucleotide
catcccaatcatgagtct

SEQ ID NO: 9426 - DNA, 18 bp, Artificial Sequence
  Synthetic Polynucleotide
gggtcaattccgtgatgg

SEQ ID NO: 9427 - DNA, 18 bp, Artificial Sequence
  Synthetic Polynucleotide
gccctcgttaattgcccc

SEQ ID NO: 9428 - DNA, 17 bp, Artificial Sequence
  Synthetic Polynucleotide
cgtgcaagaactacatg

SEQ ID NO: 9429 - DNA, 17 bp, Artificial Sequence
  Synthetic Polynucleotide
agccacaatcgcaaatc

SEQ ID NO: 9430 - DNA, 18 bp, Artificial Sequence
  Synthetic Polynucleotide
attgccaagagttcactg

SEQ ID NO: 9431 - DNA, 17 bp, Artificial Sequence
  Synthetic Polynucleotide
tctcaactgtccttgag

SEQ ID NO: 9432 - DNA, 17 bp, Artificial Sequence
  Synthetic Polynucleotide
ccatcttagccagtgtg

SEQ ID NO: 9433 - DNA, 17 bp, Artificial Sequence
  Synthetic Polynucleotide
ggtcaagcaagttaccg

SEQ ID NO: 9434 - DNA, 18 bp, Artificial Sequence
  Synthetic Polynucleotide
ttaattcgcccagcccct

SEQ ID NO: 9435 - DNA, 17 bp, Artificial Sequence
  Synthetic Polynucleotide
cagattcgccccatata

SEQ ID NO: 9436 - DNA, 18 bp, Artificial Sequence
  Synthetic Polynucleotide
ttccagttagaaccatga

SEQ ID NO: 9437 - DNA, 18 bp, Artificial Sequence
  Synthetic Polynucleotide
ttgattatcgccttgagc

SEQ ID NO: 9438 - DNA, 18 bp, Artificial Sequence
  Synthetic Polynucleotide
gattcttttagtgccgtc

SEQ ID NO: 9439 - DNA, 18 bp, Artificial Sequence
  Synthetic Polynucleotide
cgtgtgccaattcttcga

SEQ ID NO: 9440 - DNA, 18 bp, Artificial Sequence
  Synthetic Polynucleotide
tcttgaagccgtcatacg

SEQ ID NO: 9441 - DNA, 17 bp, Artificial Sequence
  Synthetic Polynucleotide
ccagtcaagcccctagc

SEQ ID NO: 9442 - DNA, 18 bp, Artificial Sequence
  Synthetic Polynucleotide
tcagattttagcaagtgc

SEQ ID NO: 9443 - DNA, 18 bp, Artificial Sequence
  Synthetic Polynucleotide
tgctattcactttcctga

SEQ ID NO: 9444 - DNA, 18 bp, Artificial Sequence
  Synthetic Polynucleotide
gtgtctcttttccagttc

SEQ ID NO: 9445 - DNA, 17 bp, Artificial Sequence
  Synthetic Polynucleotide
ggccaaccagaattcgc

SEQ ID NO: 9446 - DNA, 18 bp, Artificial Sequence
  Synthetic Polynucleotide
ggtgacaaaacattcctc

SEQ ID NO: 9447 - DNA, 17 bp, Artificial Sequence
  Synthetic Polynucleotide
taaattcccaaacgccg

SEQ ID NO: 9448 - DNA, 17 bp, Artificial Sequence
  Synthetic Polynucleotide
cgtctctatctccgcta

SEQ ID NO: 9449 - DNA, 18 bp, Artificial Sequence
  Synthetic Polynucleotide
tagccacaaacccttaca

SEQ ID NO: 9450 - DNA, 17 bp, Artificial Sequence
  Synthetic Polynucleotide
tgccccagccaaaattg

SEQ ID NO: 9451 - DNA, 18 bp, Artificial Sequence
  Synthetic Polynucleotide
accaatgataatgccgca

SEQ ID NO: 9452 - DNA, 18 bp, Artificial Sequence
  Synthetic Polynucleotide
attgcccaactttgaacc

SEQ ID NO: 9453 - DNA, 17 bp, Artificial Sequence
  Synthetic Polynucleotide
gttccgcaagcatgtgc

SEQ ID NO: 9454 - DNA, 17 bp, Artificial Sequence
  Synthetic Polynucleotide
ccagctattacgcaaac

SEQ ID NO: 9455 - DNA, 18 bp, Artificial Sequence
  Synthetic Polynucleotide
tcacaacaagagtttctc

SEQ ID NO: 9456 - DNA, 17 bp, Artificial Sequence
  Synthetic Polynucleotide
gactccccaaatgtcat

SEQ ID NO: 9457 - DNA, 17 bp, Artificial Sequence
  Synthetic Polynucleotide
aaagatatgccgtcagc

SEQ ID NO: 9458 - DNA, 18 bp, Artificial Sequence
  Synthetic Polynucleotide
atgtctaggtagccctcg

SEQ ID NO: 9459 - DNA, 17 bp, Artificial Sequence
  Synthetic Polynucleotide
ctccaaaccctcctacg

SEQ ID NO: 9460 - DNA, 18 bp, Artificial Sequence
  Synthetic Polynucleotide
atgttccagtccctcctt

SEQ ID NO: 9461 - DNA, 18 bp, Artificial Sequence
  Synthetic Polynucleotide
ccacttccccattaggaa

SEQ ID NO: 9462 - DNA, 17 bp, Artificial Sequence
  Synthetic Polynucleotide
ataaccgctccgatcta

SEQ ID NO: 9463 - DNA, 18 bp, Artificial Sequence
  Synthetic Polynucleotide
gaaggtcaagaaaggtgc

SEQ ID NO: 9464 - DNA, 17 bp, Artificial Sequence
  Synthetic Polynucleotide
acgaaccagttccacaa

SEQ ID NO: 9465 - DNA, 17 bp, Artificial Sequence
  Synthetic Polynucleotide
attagtcccagccattg

SEQ ID NO: 9466 - DNA, 17 bp, Artificial Sequence
  Synthetic Polynucleotide
gccatcgtccataagat

SEQ ID NO: 9467 - DNA, 17 bp, Artificial Sequence
  Synthetic Polynucleotide
acttttcgcccacaacc

SEQ ID NO: 9468 - DNA, 18 bp, Artificial Sequence
  Synthetic Polynucleotide
atttcccagagccgccgg

SEQ ID NO: 9469 - DNA, 18 bp, Artificial Sequence
  Synthetic Polynucleotide
tctcccttacattccgct

SEQ ID NO: 9470 - DNA, 18 bp, Artificial Sequence
  Synthetic Polynucleotide
tccatccccaatgtcatc

SEQ ID NO: 9471 - DNA, 17 bp, Artificial Sequence
  Synthetic Polynucleotide
agccatcttttgagagg

SEQ ID NO: 9472 - DNA, 18 bp, Artificial Sequence
  Synthetic Polynucleotide
gcaatgagtccataaacg

SEQ ID NO: 9473 - DNA, 18 bp, Artificial Sequence
  Synthetic Polynucleotide
ctactgaacccctcgtta

SEQ ID NO: 9474 - DNA, 18 bp, Artificial Sequence
  Synthetic Polynucleotide
aatccaacccttccaata

SEQ ID NO: 9475 - DNA, 18 bp, Artificial Sequence
  Synthetic Polynucleotide
agagatttccaatcgcat

SEQ ID NO: 9476 - DNA, 18 bp, Artificial Sequence
  Synthetic Polynucleotide
gtttccacaagttcacat

SEQ ID NO: 9477 - DNA, 18 bp, Artificial Sequence
  Synthetic Polynucleotide
gctatgaaaatgccatca

SEQ ID NO: 9478 - DNA, 17 bp, Artificial Sequence
  Synthetic Polynucleotide
tgtgtcccaactccccg

SEQ ID NO: 9479 - DNA, 17 bp, Artificial Sequence
  Synthetic Polynucleotide
ggtacgcaaactgccac

SEQ ID NO: 9480 - DNA, 18 bp, Artificial Sequence
  Synthetic Polynucleotide
tggtcctacaagttccac

SEQ ID NO: 9481 - DNA, 18 bp, Artificial Sequence
  Synthetic Polynucleotide
gaacgctaataagccaat

SEQ ID NO: 9482 - DNA, 17 bp, Artificial Sequence
  Synthetic Polynucleotide
gccgtatcccaaactat

SEQ ID NO: 9483 - DNA, 18 bp, Artificial Sequence
  Synthetic Polynucleotide
ccgcaagagaataagtgc

SEQ ID NO: 9484 - DNA, 18 bp, Artificial Sequence
  Synthetic Polynucleotide
gtaactgtactcctcccc

SEQ ID NO: 9485 - DNA, 18 bp, Artificial Sequence
  Synthetic Polynucleotide
cttcaactttgccctcct

SEQ ID NO: 9486 - DNA, 17 bp, Artificial Sequence
  Synthetic Polynucleotide
tatggcgattgaaccgt

SEQ ID NO: 9487 - DNA, 17 bp, Artificial Sequence
  Synthetic Polynucleotide
tcatcatcacaaatcgc

SEQ ID NO: 9488 - DNA, 17 bp, Artificial Sequence
  Synthetic Polynucleotide
gccttatgccaaaccag

SEQ ID NO: 9489 - DNA, 18 bp, Artificial Sequence
  Synthetic Polynucleotide
aagaggcactaaaagtga

SEQ ID NO: 9490 - DNA, 18 bp, Artificial Sequence
  Synthetic Polynucleotide
tatctcagcactgcaaat

SEQ ID NO: 9491 - DNA, 17 bp, Artificial Sequence
  Synthetic Polynucleotide
gtcaggtcaaggggaac

SEQ ID NO: 9492 - DNA, 17 bp, Artificial Sequence
  Synthetic Polynucleotide
tattgtctccagtctcc

SEQ ID NO: 9493 - DNA, 17 bp, Artificial Sequence
  Synthetic Polynucleotide
acatagcctccccttta

SEQ ID NO: 9494 - DNA, 17 bp, Artificial Sequence
  Synthetic Polynucleotide
gcatgtatcactcccga

SEQ ID NO: 9495 - DNA, 17 bp, Artificial Sequence
  Synthetic Polynucleotide
gtgacgtatccttccag

SEQ ID NO: 9496 - DNA, 18 bp, Artificial Sequence
  Synthetic Polynucleotide
atcctgtccaaacagttc

SEQ ID NO: 9497 - DNA, 18 bp, Artificial Sequence
  Synthetic Polynucleotide
gtatgcctgttcctagcc

SEQ ID NO: 9498 - DNA, 18 bp, Artificial Sequence
  Synthetic Polynucleotide
acaatcttcctctgcaat

SEQ ID NO: 9499 - DNA, 18 bp, Artificial Sequence
  Synthetic Polynucleotide
gtgcgtaaatccatcttc

SEQ ID NO: 9500 - DNA, 18 bp, Artificial Sequence
  Synthetic Polynucleotide
tacatcctatgtcccgtt

SEQ ID NO: 9501 - DNA, 17 bp, Artificial Sequence
  Synthetic Polynucleotide
tccgttgatatcccttt

SEQ ID NO: 9502 - DNA, 17 bp, Artificial Sequence
  Synthetic Polynucleotide
cgaccgttgtattccga

SEQ ID NO: 9503 - DNA, 18 bp, Artificial Sequence
  Synthetic Polynucleotide
tgcaatttccttctgcgg

SEQ ID NO: 9504 - DNA, 18 bp, Artificial Sequence
  Synthetic Polynucleotide
ttctctacctctgactcg

SEQ ID NO: 9505 - DNA, 18 bp, Artificial Sequence
  Synthetic Polynucleotide
tattttcctttcccacct

SEQ ID NO: 9506 - DNA, 18 bp, Artificial Sequence
  Synthetic Polynucleotide
agctcttccttagtctta

SEQ ID NO: 9507 - DNA, 18 bp, Artificial Sequence
  Synthetic Polynucleotide
tgtcgtgaatctccacta

SEQ ID NO: 9508 - DNA, 17 bp, Artificial Sequence
  Synthetic Polynucleotide
tcaacacatttccatcc

SEQ ID NO: 9509 - DNA, 18 bp, Artificial Sequence
  Synthetic Polynucleotide
aatgacgttgtaccaagc

SEQ ID NO: 9510 - DNA, 18 bp, Artificial Sequence
  Synthetic Polynucleotide
tccgacatccaacaataa

SEQ ID NO: 9511 - DNA, 17 bp, Artificial Sequence
  Synthetic Polynucleotide
gtcaatcatcccagctt

SEQ ID NO: 9512 - DNA, 18 bp, Artificial Sequence
  Synthetic Polynucleotide
aacacttctatcccgtct

SEQ ID NO: 9513 - DNA, 17 bp, Artificial Sequence
  Synthetic Polynucleotide
cagaaaccccagacatt

SEQ ID NO: 9514 - DNA, 17 bp, Artificial Sequence
  Synthetic Polynucleotide
cttcagccgaacctgca

SEQ ID NO: 9515 - DNA, 17 bp, Artificial Sequence
  Synthetic Polynucleotide
gtccaaatccgtaatgc

SEQ ID NO: 9516 - DNA, 18 bp, Artificial Sequence
  Synthetic Polynucleotide
tcgatgtaatctccgtcc

SEQ ID NO: 9517 - DNA, 17 bp, Artificial Sequence
  Synthetic Polynucleotide
ttcttccactccgtttt

SEQ ID NO: 9518 - DNA, 17 bp, Artificial Sequence
  Synthetic Polynucleotide
cagcctgcaagtattcc

SEQ ID NO: 9519 - DNA, 18 bp, Artificial Sequence
  Synthetic Polynucleotide
cgttgatatccctttccg

SEQ ID NO: 9520 - DNA, 17 bp, Artificial Sequence
  Synthetic Polynucleotide
actgagtcctctctgcc

SEQ ID NO: 9521 - DNA, 18 bp, Artificial Sequence
  Synthetic Polynucleotide
gcctttcttcttcagatg

SEQ ID NO: 9522 - DNA, 18 bp, Artificial Sequence
  Synthetic Polynucleotide
cctctcccatttcccgta

SEQ ID NO: 9523 - DNA, 18 bp, Artificial Sequence
  Synthetic Polynucleotide
caggtccagttcaactac

SEQ ID NO: 9524 - DNA, 17 bp, Artificial Sequence
  Synthetic Polynucleotide
cctctaaccccgtgtat

SEQ ID NO: 9525 - DNA, 18 bp, Artificial Sequence
  Synthetic Polynucleotide
aatcccgtccatcattct

SEQ ID NO: 9526 - DNA, 17 bp, Artificial Sequence
  Synthetic Polynucleotide
tgtgtgccaatacccgg

SEQ ID NO: 9527 - DNA, 18 bp, Artificial Sequence
  Synthetic Polynucleotide
gttccaaatcccctctat

SEQ ID NO: 9528 - DNA, 18 bp, Artificial Sequence
  Synthetic Polynucleotide
agaccgataacccctaat

SEQ ID NO: 9529 - DNA, 18 bp, Artificial Sequence
  Synthetic Polynucleotide
gtccactcaaccgtttca

SEQ ID NO: 9530 - DNA, 18 bp, Artificial Sequence
  Synthetic Polynucleotide
gtcctctctctcaatccc

SEQ ID NO: 9531 - DNA, 18 bp, Artificial Sequence
  Synthetic Polynucleotide
cattcccttcaagttctg

SEQ ID NO: 9532 - DNA, 18 bp, Artificial Sequence
  Synthetic Polynucleotide
ttctctcctgcctgcatt

SEQ ID NO: 9533 - DNA, 18 bp, Artificial Sequence
  Synthetic Polynucleotide
ccaatcagatgcaacata

SEQ ID NO: 9534 - DNA, 18 bp, Artificial Sequence
  Synthetic Polynucleotide
tctttcccatctcccgta

SEQ ID NO: 9535 - DNA, 18 bp, Artificial Sequence
  Synthetic Polynucleotide
gtactccttctgaaccta

SEQ ID NO: 9536 - DNA, 17 bp, Artificial Sequence
  Synthetic Polynucleotide
tggcgataaccccttct

SEQ ID NO: 9537 - DNA, 17 bp, Artificial Sequence
  Synthetic Polynucleotide
ccacatacttctccgtt

SEQ ID NO: 9538 - DNA, 18 bp, Artificial Sequence
  Synthetic Polynucleotide
gaaccgtctactagtctc

SEQ ID NO: 9539 - DNA, 17 bp, Artificial Sequence
  Synthetic Polynucleotide
tcagcctgtacatcctc

SEQ ID NO: 9540 - DNA, 17 bp, Artificial Sequence
  Synthetic Polynucleotide
gtcatgtctctcaacca

SEQ ID NO: 9541 - DNA, 18 bp, Artificial Sequence
  Synthetic Polynucleotide
cgtatcagacatccaaca

SEQ ID NO: 9542 - DNA, 17 bp, Artificial Sequence
  Synthetic Polynucleotide
gactctacccaatcgta

SEQ ID NO: 9543 - DNA, 18 bp, Artificial Sequence
  Synthetic Polynucleotide
gcaaaccgttcattcagg

SEQ ID NO: 9544 - DNA, 18 bp, Artificial Sequence
  Synthetic Polynucleotide
tctcaaatttctccactg

SEQ ID NO: 9545 - DNA, 17 bp, Artificial Sequence
  Synthetic Polynucleotide
tccgaacattcagcgag

SEQ ID NO: 9546 - DNA, 18 bp, Artificial Sequence
  Synthetic Polynucleotide
tgtttacctcctctagct

SEQ ID NO: 9547 - DNA, 17 bp, Artificial Sequence
  Synthetic Polynucleotide
atgcacccctatagaga

SEQ ID NO: 9548 - DNA, 18 bp, Artificial Sequence
  Synthetic Polynucleotide
gcacatccctttctaaca

SEQ ID NO: 9549 - DNA, 18 bp, Artificial Sequence
  Synthetic Polynucleotide
ccttaaagacccaattcc

SEQ ID NO: 9550 - DNA, 18 bp, Artificial Sequence
  Synthetic Polynucleotide
tcttcagtttccccttaa

SEQ ID NO: 9551 - DNA, 17 bp, Artificial Sequence
  Synthetic Polynucleotide
cgctcctcccattacag

SEQ ID NO: 9552 - DNA, 17 bp, Artificial Sequence
  Synthetic Polynucleotide
aatgctccaaatgcgtt

SEQ ID NO: 9553 - DNA, 17 bp, Artificial Sequence
  Synthetic Polynucleotide
cttccgtagtccacatg

SEQ ID NO: 9554 - DNA, 17 bp, Artificial Sequence
  Synthetic Polynucleotide
tcaacccaaccccgtcg

SEQ ID NO: 9555 - DNA, 18 bp, Artificial Sequence
  Synthetic Polynucleotide
attctaggtcctgcctcg

SEQ ID NO: 9556 - DNA, 17 bp, Artificial Sequence
  Synthetic Polynucleotide
ggccaccttccaagtag

SEQ ID NO: 9557 - DNA, 17 bp, Artificial Sequence
  Synthetic Polynucleotide
ccctcttcttcctccgc

SEQ ID NO: 9558 - DNA, 18 bp, Artificial Sequence
  Synthetic Polynucleotide
gctagttaatcctccgag

SEQ ID NO: 9559 - DNA, 18 bp, Artificial Sequence
  Synthetic Polynucleotide
tctttaacccaacccttg

SEQ ID NO: 9560 - DNA, 18 bp, Artificial Sequence
  Synthetic Polynucleotide
ggcgtctcaattaagcgc

SEQ ID NO: 9561 - DNA, 18 bp, Artificial Sequence
  Synthetic Polynucleotide
atcatcttcctttcccat

SEQ ID NO: 9562 - DNA, 17 bp, Artificial Sequence
  Synthetic Polynucleotide
ctcgaccactaatgaca

SEQ ID NO: 9563 - DNA, 17 bp, Artificial Sequence
  Synthetic Polynucleotide
ccttccaagtcaaccat

SEQ ID NO: 9564 - DNA, 18 bp, Artificial Sequence
  Synthetic Polynucleotide
gcttaccgtctagttcat

SEQ ID NO: 9565 - DNA, 18 bp, Artificial Sequence
  Synthetic Polynucleotide
gcactcctccctttattt

SEQ ID NO: 9566 - DNA, 18 bp, Artificial Sequence
  Synthetic Polynucleotide
taatgacgtttaacagct

SEQ ID NO: 9567 - DNA, 18 bp, Artificial Sequence
  Synthetic Polynucleotide
acatacccattgtccaat

SEQ ID NO: 9568 - DNA, 17 bp, Artificial Sequence
  Synthetic Polynucleotide
ggccaaatagctccgag

SEQ ID NO: 9569 - DNA, 18 bp, Artificial Sequence
  Synthetic Polynucleotide
cctttgttcaataccccg

SEQ ID NO: 9570 - DNA, 17 bp, Artificial Sequence
  Synthetic Polynucleotide
gtgcttgttgaatcacc

SEQ ID NO: 9571 - DNA, 18 bp, Artificial Sequence
  Synthetic Polynucleotide
aggggcgttgacatcacg

SEQ ID NO: 9572 - DNA, 17 bp, Artificial Sequence
  Synthetic Polynucleotide
acccacatgcggtatat

SEQ ID NO: 9573 - DNA, 18 bp, Artificial Sequence
  Synthetic Polynucleotide
ccagcactaaatgcgtac

SEQ ID NO: 9574 - DNA, 17 bp, Artificial Sequence
  Synthetic Polynucleotide
aggcccactcccatagg

SEQ ID NO: 9575 - DNA, 17 bp, Artificial Sequence
  Synthetic Polynucleotide
gtggtggacttctctca

SEQ ID NO: 9576 - DNA, 17 bp, Artificial Sequence
  Synthetic Polynucleotide
acgtgcagaggtgaagc

SEQ ID NO: 9577 - DNA, 17 bp, Artificial Sequence
  Synthetic Polynucleotide
gcgcacctctctttacg

SEQ ID NO: 9578 - DNA, 18 bp, Artificial Sequence
  Synthetic Polynucleotide
gaacgtcttctcccatag

SEQ ID NO: 9579 - DNA, 18 bp, Artificial Sequence
  Synthetic Polynucleotide
ccattgaagcaatcacta

SEQ ID NO: 9580 - DNA, 18 bp, Artificial Sequence
  Synthetic Polynucleotide
tatgcctacagcctccta

SEQ ID NO: 9581 - DNA, 18 bp, Artificial Sequence
  Synthetic Polynucleotide
gtttgctgacgcaacccc

SEQ ID NO: 9582 - DNA, 17 bp, Artificial Sequence
  Synthetic Polynucleotide
gtcaccccagaaaccac

SEQ ID NO: 9583 - DNA, 17 bp, Artificial Sequence
  Synthetic Polynucleotide
tgcctatgctgcccgcg

SEQ ID NO: 9584 - DNA, 17 bp, Artificial Sequence
  Synthetic Polynucleotide
agccaaagcacatcatt

SEQ ID NO: 9585 - DNA, 17 bp, Artificial Sequence
  Synthetic Polynucleotide
gaattgatttcgtcggc

SEQ ID NO: 9586 - DNA, 17 bp, Artificial Sequence
  Synthetic Polynucleotide
gctgctcatcacgccca

SEQ ID NO: 9587 - DNA, 18 bp, Artificial Sequence
  Synthetic Polynucleotide
gccagggtaagaatggac

SEQ ID NO: 9588 - DNA, 17 bp, Artificial Sequence
  Synthetic Polynucleotide
gtcaagctccaggacgg

SEQ ID NO: 9589 - DNA, 17 bp, Artificial Sequence
  Synthetic Polynucleotide
ggccaggttcatcccca

SEQ ID NO: 9590 - DNA, 17 bp, Artificial Sequence
  Synthetic Polynucleotide
tgttcgagggagaccag

SEQ ID NO: 9591 - DNA, 18 bp, Artificial Sequence
  Synthetic Polynucleotide
ttttatttgcccatccta

SEQ ID NO: 9592 - DNA, 17 bp, Artificial Sequence
  Synthetic Polynucleotide
ccatgtacttgagcagg

SEQ ID NO: 9593 - DNA, 18 bp, Artificial Sequence
  Synthetic Polynucleotide
tactacttttacaacgcc

SEQ ID NO: 9594 - DNA, 18 bp, Artificial Sequence
  Synthetic Polynucleotide
ctttgccagcctctaccc

SEQ ID NO: 9595 - DNA, 18 bp, Artificial Sequence
  Synthetic Polynucleotide
acagcgagtccgtgtccc

SEQ ID NO: 9596 - DNA, 17 bp, Artificial Sequence
  Synthetic Polynucleotide
gccctgagccagtgcca

SEQ ID NO: 9597 - DNA, 18 bp, Artificial Sequence
  Synthetic Polynucleotide
tccagaaccactgcgggt

SEQ ID NO: 9598 - DNA, 18 bp, Artificial Sequence
  Synthetic Polynucleotide
ccgatatcctgatcttgg

SEQ ID NO: 9599 - DNA, 17 bp, Artificial Sequence
  Synthetic Polynucleotide
tagagtgtttgggtgaa

SEQ ID NO: 9600 - DNA, 18 bp, Artificial Sequence
  Synthetic Polynucleotide
gcgagtgcaacattagga

SEQ ID NO: 9601 - DNA, 18 bp, Artificial Sequence
  Synthetic Polynucleotide
ttcatgtagttgattgcg

SEQ ID NO: 9602 - DNA, 18 bp, Artificial Sequence
  Synthetic Polynucleotide
ttttgcatcttgtgacga

SEQ ID NO: 9603 - DNA, 17 bp, Artificial Sequence
  Synthetic Polynucleotide
aaacgaccatcagcaag

SEQ ID NO: 9604 - DNA, 17 bp, Artificial Sequence
  Synthetic Polynucleotide
gcgagtgcctcatgatc

SEQ ID NO: 9605 - DNA, 17 bp, Artificial Sequence
  Synthetic Polynucleotide
cgcgacgagtttcctca

SEQ ID NO: 9606 - DNA, 17 bp, Artificial Sequence
  Synthetic Polynucleotide
ggccagtaccagctttt

SEQ ID NO: 9607 - DNA, 18 bp, Artificial Sequence
  Synthetic Polynucleotide
gttcctgaagccatagca

SEQ ID NO: 9608 - DNA, 18 bp, Artificial Sequence
  Synthetic Polynucleotide
tggatttcctttctgagc

SEQ ID NO: 9609 - DNA, 17 bp, Artificial Sequence
  Synthetic Polynucleotide
tgaaccaatcccagcca

SEQ ID NO: 9610 - DNA, 17 bp, Artificial Sequence
  Synthetic Polynucleotide
cggtgtcagtaacttca

SEQ ID NO: 9611 - DNA, 17 bp, Artificial Sequence
  Synthetic Polynucleotide
ctaccagtgctacaaca

SEQ ID NO: 9612 - DNA, 17 bp, Artificial Sequence
  Synthetic Polynucleotide
gtcagtctgaaccttgg

SEQ ID NO: 9613 - DNA, 18 bp, Artificial Sequence
  Synthetic Polynucleotide
ccgtggaagaagagtccc

SEQ ID NO: 9614 - DNA, 18 bp, Artificial Sequence
  Synthetic Polynucleotide
cgcccttagaagtccagc

SEQ ID NO: 9615 - DNA, 17 bp, Artificial Sequence
  Synthetic Polynucleotide
ggccttagccgagcccg

SEQ ID NO: 9616 - DNA, 17 bp, Artificial Sequence
  Synthetic Polynucleotide
cttgaaccagccgacgt

SEQ ID NO: 9617 - DNA, 17 bp, Artificial Sequence
  Synthetic Polynucleotide
gagttcctctacgccct

SEQ ID NO: 9618 - DNA, 18 bp, Artificial Sequence
  Synthetic Polynucleotide
ctgtggaattttgccagc

SEQ ID NO: 9619 - DNA, 18 bp, Artificial Sequence
  Synthetic Polynucleotide
tcaacattccagtctctt

SEQ ID NO: 9620 - DNA, 17 bp, Artificial Sequence
  Synthetic Polynucleotide
acagttttcctcatccc

SEQ ID NO: 9621 - DNA, 18 bp, Artificial Sequence
  Synthetic Polynucleotide
tacgttcttattgaagca

SEQ ID NO: 9622 - DNA, 17 bp, Artificial Sequence
  Synthetic Polynucleotide
ctccaggtagtccttgc

SEQ ID NO: 9623 - DNA, 17 bp, Artificial Sequence
  Synthetic Polynucleotide
gactttgccagcctgta

SEQ ID NO: 9624 - DNA, 17 bp, Artificial Sequence
  Synthetic Polynucleotide
tcctcatcatcctcctc

SEQ ID NO: 9625 - DNA, 18 bp, Artificial Sequence
  Synthetic Polynucleotide
acacttcgtggattagag

SEQ ID NO: 9626 - DNA, 18 bp, Artificial Sequence
  Synthetic Polynucleotide
cctatgcctgagttatgc

SEQ ID NO: 9627 - DNA, 18 bp, Artificial Sequence
  Synthetic Polynucleotide
gctgaactttagcagaaa

SEQ ID NO: 9628 - DNA, 18 bp, Artificial Sequence
  Synthetic Polynucleotide
gtttcatcgagccgtgat

SEQ ID NO: 9629 - DNA, 17 bp, Artificial Sequence
  Synthetic Polynucleotide
cgacatcatacgccagt

SEQ ID NO: 9630 - DNA, 17 bp, Artificial Sequence
  Synthetic Polynucleotide
cgaagaccgatttggag

SEQ ID NO: 9631 - DNA, 17 bp, Artificial Sequence
  Synthetic Polynucleotide
atgccaaagcatccata

SEQ ID NO: 9632 - DNA, 18 bp, Artificial Sequence
  Synthetic Polynucleotide
tcctttccgtttgaaaat

SEQ ID NO: 9633 - DNA, 18 bp, Artificial Sequence
  Synthetic Polynucleotide
ggtgacaacccctattaa

SEQ ID NO: 9634 - DNA, 18 bp, Artificial Sequence
  Synthetic Polynucleotide
tccgacgtacttgaaaat

SEQ ID NO: 9635 - DNA, 17 bp, Artificial Sequence
  Synthetic Polynucleotide
taagtcaagccgacgag

SEQ ID NO: 9636 - DNA, 17 bp, Artificial Sequence
  Synthetic Polynucleotide
acattttgacgagcctg

SEQ ID NO: 9637 - DNA, 17 bp, Artificial Sequence
  Synthetic Polynucleotide
tgtgcgacagtacttac

SEQ ID NO: 9638 - DNA, 18 bp, Artificial Sequence
  Synthetic Polynucleotide
gcatctccgtatctgtta

SEQ ID NO: 9639 - DNA, 18 bp, Artificial Sequence
  Synthetic Polynucleotide
aggagattacgtgccagg

SEQ ID NO: 9640 - DNA, 18 bp, Artificial Sequence
  Synthetic Polynucleotide
ggaccaacaaaaccataa

SEQ ID NO: 9641 - DNA, 18 bp, Artificial Sequence
  Synthetic Polynucleotide
gtaccatgtgacctcatt

SEQ ID NO: 9642 - DNA, 17 bp, Artificial Sequence
  Synthetic Polynucleotide
tgtcctctctgtgtgtc

SEQ ID NO: 9643 - DNA, 18 bp, Artificial Sequence
  Synthetic Polynucleotide
tccaacatccagttttac

SEQ ID NO: 9644 - DNA, 17 bp, Artificial Sequence
  Synthetic Polynucleotide
gcgtgtctatagccttt

SEQ ID NO: 9645 - DNA, 18 bp, Artificial Sequence
  Synthetic Polynucleotide
acgatcttaccagccgtc

SEQ ID NO: 9646 - DNA, 18 bp, Artificial Sequence
  Synthetic Polynucleotide
ctgaatcttgccatctgt

SEQ ID NO: 9647 - DNA, 18 bp, Artificial Sequence
  Synthetic Polynucleotide
ccaccttatttgatctgc

SEQ ID NO: 9648 - DNA, 17 bp, Artificial Sequence
  Synthetic Polynucleotide
tgtagacgatcctacgt

SEQ ID NO: 9649 - DNA, 17 bp, Artificial Sequence
  Synthetic Polynucleotide
ttggtggtaggcgtgta

SEQ ID NO: 9650 - DNA, 17 bp, Artificial Sequence
  Synthetic Polynucleotide
ggtctctggacatccat

SEQ ID NO: 9651 - DNA, 17 bp, Artificial Sequence
  Synthetic Polynucleotide
cccagaagtgcatgaaa

SEQ ID NO: 9652 - DNA, 17 bp, Artificial Sequence
  Synthetic Polynucleotide
aagagaggtggaccaaa

SEQ ID NO: 9653 - DNA, 17 bp, Artificial Sequence
  Synthetic Polynucleotide
atttggcgtacaaacac

SEQ ID NO: 9654 - DNA, 18 bp, Artificial Sequence
  Synthetic Polynucleotide
ggttaggaacaaaagcgc

SEQ ID NO: 9655 - DNA, 17 bp, Artificial Sequence
  Synthetic Polynucleotide
attcgggatgcttatcc

SEQ ID NO: 9656 - DNA, 18 bp, Artificial Sequence
  Synthetic Polynucleotide
ccgttccgttgatttgga

SEQ ID NO: 9657 - DNA, 18 bp, Artificial Sequence
  Synthetic Polynucleotide
ttgggtttccagttctac

SEQ ID NO: 9658 - DNA, 17 bp, Artificial Sequence
  Synthetic Polynucleotide
acactgagtttcgtcac

SEQ ID NO: 9659 - DNA, 18 bp, Artificial Sequence
  Synthetic Polynucleotide
tcggtatcaagctgttta

SEQ ID NO: 9660 - DNA, 17 bp, Artificial Sequence
  Synthetic Polynucleotide
tatccaatgcgataggc

SEQ ID NO: 9661 - DNA, 18 bp, Artificial Sequence
  Synthetic Polynucleotide
tgaggcgggtattgatca

SEQ ID NO: 9662 - DNA, 17 bp, Artificial Sequence
  Synthetic Polynucleotide
acaacaaccaccagaaa

SEQ ID NO: 9663 - DNA, 18 bp, Artificial Sequence
  Synthetic Polynucleotide
ttagcgagtggtgttggt

SEQ ID NO: 9664 - DNA, 17 bp, Artificial Sequence
  Synthetic Polynucleotide
tacaggcggtagttaaa

SEQ ID NO: 9665 - DNA, 18 bp, Artificial Sequence
  Synthetic Polynucleotide
atgctgataattgggagt

SEQ ID NO: 9666 - DNA, 17 bp, Artificial Sequence
  Synthetic Polynucleotide
ctccgtgttttccgtcg

SEQ ID NO: 9667 - DNA, 17 bp, Artificial Sequence
  Synthetic Polynucleotide
cgggtcgatcagaagat

SEQ ID NO: 9668 - DNA, 18 bp, Artificial Sequence
  Synthetic Polynucleotide
tcgagattcgtagccacc

SEQ ID NO: 9669 - DNA, 18 bp, Artificial Sequence
  Synthetic Polynucleotide
tctggcaagatttattgg

SEQ ID NO: 9670 - DNA, 17 bp, Artificial Sequence
  Synthetic Polynucleotide
ggttgcttcaccctcta

SEQ ID NO: 9671 - DNA, 17 bp, Artificial Sequence
  Synthetic Polynucleotide
tgctgggtattcagagg

SEQ ID NO: 9672 - DNA, 18 bp, Artificial Sequence
  Synthetic Polynucleotide
ggtcaaagtcgatgtgtt

SEQ ID NO: 9673 - DNA, 18 bp, Artificial Sequence
  Synthetic Polynucleotide
ccgattcaaggcagagaa

SEQ ID NO: 9674 - DNA, 17 bp, Artificial Sequence
  Synthetic Polynucleotide
cttcagttcgtcgtctg

SEQ ID NO: 9675 - DNA, 18 bp, Artificial Sequence
  Synthetic Polynucleotide
gcgggtatgaccaggtac

SEQ ID NO: 9676 - DNA, 17 bp, Artificial Sequence
  Synthetic Polynucleotide
gggcgtgggtttggcgt

SEQ ID NO: 9677 - DNA, 18 bp, Artificial Sequence
  Synthetic Polynucleotide
gagatttgcaccttccac

SEQ ID NO: 9678 - DNA, 17 bp, Artificial Sequence
  Synthetic Polynucleotide
tcgtgtagttggtaacg

SEQ ID NO: 9679 - DNA, 18 bp, Artificial Sequence
  Synthetic Polynucleotide
gaattgcaggaggaaaag

SEQ ID NO: 9680 - DNA, 17 bp, Artificial Sequence
  Synthetic Polynucleotide
ccaggatcattccatca

SEQ ID NO: 9681 - DNA, 17 bp, Artificial Sequence
  Synthetic Polynucleotide
cggtcgtgattgtcggg

SEQ ID NO: 9682 - DNA, 18 bp, Artificial Sequence
  Synthetic Polynucleotide
tcatttggcggtatttta

SEQ ID NO: 9683 - DNA, 18 bp, Artificial Sequence
  Synthetic Polynucleotide
tgtcggtagttctattga

SEQ ID NO: 9684 - DNA, 18 bp, Artificial Sequence
  Synthetic Polynucleotide
taaaggaggtattccagt

SEQ ID NO: 9685 - DNA, 18 bp, Artificial Sequence
  Synthetic Polynucleotide
gctcttatttgagcgttt

SEQ ID NO: 9686 - DNA, 18 bp, Artificial Sequence
  Synthetic Polynucleotide
aacaaacagctacaatga

SEQ ID NO: 9687 - DNA, 17 bp, Artificial Sequence
  Synthetic Polynucleotide
tgttcaggtgctctgcg

SEQ ID NO: 9688 - DNA, 18 bp, Artificial Sequence
  Synthetic Polynucleotide
gaggttcttcatggtgag

SEQ ID NO: 9689 - DNA, 17 bp, Artificial Sequence
  Synthetic Polynucleotide
aggtcaccctcatcata

SEQ ID NO: 9690 - DNA, 18 bp, Artificial Sequence
  Synthetic Polynucleotide
ccaatgaatccttcgtgg

SEQ ID NO: 9691 - DNA, 18 bp, Artificial Sequence
  Synthetic Polynucleotide
tctcgctcgaactcggaa

SEQ ID NO: 9692 - DNA, 17 bp, Artificial Sequence
  Synthetic Polynucleotide
cccaggaggcccagaga

SEQ ID NO: 9693 - DNA, 17 bp, Artificial Sequence
  Synthetic Polynucleotide
tccagctccatatcgtc

SEQ ID NO: 9694 - DNA, 17 bp, Artificial Sequence
  Synthetic Polynucleotide
tgtccaaaatgtccagg

SEQ ID NO: 9695 - DNA, 18 bp, Artificial Sequence
  Synthetic Polynucleotide
taaccctttacctaagct

SEQ ID NO: 9696 - DNA, 18 bp, Artificial Sequence
  Synthetic Polynucleotide
ggtagtgtatggggatac

SEQ ID NO: 9697 - DNA, 18 bp, Artificial Sequence
  Synthetic Polynucleotide
caatcgcatgattccata

SEQ ID NO: 9698 - DNA, 18 bp, Artificial Sequence
  Synthetic Polynucleotide
tgacttccgctaatgaaa

SEQ ID NO: 9699 - DNA, 18 bp, Artificial Sequence
  Synthetic Polynucleotide
acggctcagaaaacgtgt

SEQ ID NO: 9700 - DNA, 17 bp, Artificial Sequence
  Synthetic Polynucleotide
tcctgagacttcggaga

SEQ ID NO: 9701 - DNA, 18 bp, Artificial Sequence
  Synthetic Polynucleotide
ttaccactcattggagag

SEQ ID NO: 9702 - DNA, 17 bp, Artificial Sequence
  Synthetic Polynucleotide
gcagcccgatctatttt

SEQ ID NO: 9703 - DNA, 17 bp, Artificial Sequence
  Synthetic Polynucleotide
cacaagggttcaagttg

SEQ ID NO: 9704 - DNA, 18 bp, Artificial Sequence
  Synthetic Polynucleotide
gtgtagccattacccatg

SEQ ID NO: 9705 - DNA, 17 bp, Artificial Sequence
  Synthetic Polynucleotide
aggatgttaccaaacgc

SEQ ID NO: 9706 - DNA, 17 bp, Artificial Sequence
  Synthetic Polynucleotide
tgacgactttacagcaa

SEQ ID NO: 9707 - DNA, 18 bp, Artificial Sequence
  Synthetic Polynucleotide
cgcaacacagcctcaaac

SEQ ID NO: 9708 - DNA, 17 bp, Artificial Sequence
  Synthetic Polynucleotide
tattacggcctaccact

SEQ ID NO: 9709 - DNA, 18 bp, Artificial Sequence
  Synthetic Polynucleotide
gtagggtcaaggaaaccc

SEQ ID NO: 9710 - DNA, 17 bp, Artificial Sequence
  Synthetic Polynucleotide
tccggtatcttgacgcc

SEQ ID NO: 9711 - DNA, 17 bp, Artificial Sequence
  Synthetic Polynucleotide
gttgtccaactgactca

SEQ ID NO: 9712 - DNA, 17 bp, Artificial Sequence
  Synthetic Polynucleotide
cgaccacactttcgttc

SEQ ID NO: 9713 - DNA, 18 bp, Artificial Sequence
  Synthetic Polynucleotide
tatagacactgaaccact

SEQ ID NO: 9714 - DNA, 18 bp, Artificial Sequence
  Synthetic Polynucleotide
gtctgtttgtctgacttc

SEQ ID NO: 9715 - DNA, 18 bp, Artificial Sequence
  Synthetic Polynucleotide
caacgggcacaggtaaat

SEQ ID NO: 9716 - DNA, 18 bp, Artificial Sequence
  Synthetic Polynucleotide
cgtctgctttctcgtaag

SEQ ID NO: 9717 - DNA, 18 bp, Artificial Sequence
  Synthetic Polynucleotide
gtctacctatttggggtt

SEQ ID NO: 9718 - DNA, 17 bp, Artificial Sequence
  Synthetic Polynucleotide
gccgagtctatcagact

SEQ ID NO: 9719 - DNA, 18 bp, Artificial Sequence
  Synthetic Polynucleotide
ctccaccctcgttgcaat

SEQ ID NO: 9720 - DNA, 18 bp, Artificial Sequence
  Synthetic Polynucleotide
gggaaacgagccaagtgg

SEQ ID NO: 9721 - DNA, 18 bp, Artificial Sequence
  Synthetic Polynucleotide
gagagctaatgtacaggg

SEQ ID NO: 9722 - DNA, 18 bp, Artificial Sequence
  Synthetic Polynucleotide
tccacatctgcaatcaat

SEQ ID NO: 9723 - DNA, 18 bp, Artificial Sequence
  Synthetic Polynucleotide
actacgactcttcctagg

SEQ ID NO: 9724 - DNA, 17 bp, Artificial Sequence
  Synthetic Polynucleotide
tctggttttgaatcccc

SEQ ID NO: 9725 - DNA, 18 bp, Artificial Sequence
  Synthetic Polynucleotide
agccagtccgaaacgctc

SEQ ID NO: 9726 - DNA, 17 bp, Artificial Sequence
  Synthetic Polynucleotide
gctaccgcctcatcatg

SEQ ID NO: 9727 - DNA, 18 bp, Artificial Sequence
  Synthetic Polynucleotide
cttctgactccgaatccg

SEQ ID NO: 9728 - DNA, 18 bp, Artificial Sequence
  Synthetic Polynucleotide
aagctgacaatagttgga

SEQ ID NO: 9729 - DNA, 18 bp, Artificial Sequence
  Synthetic Polynucleotide
ttcctgcaatatcgccaa

SEQ ID NO: 9730 - DNA, 17 bp, Artificial Sequence
  Synthetic Polynucleotide
agtgatcaatggacacc

SEQ ID NO: 9731 - DNA, 17 bp, Artificial Sequence
  Synthetic Polynucleotide
taaaacgctcatgttgc

SEQ ID NO: 9732 - DNA, 18 bp, Artificial Sequence
  Synthetic Polynucleotide
tttcgagcacaatctaca

SEQ ID NO: 9733 - DNA, 18 bp, Artificial Sequence
  Synthetic Polynucleotide
tacccacgtataacactg

SEQ ID NO: 9734 - DNA, 18 bp, Artificial Sequence
  Synthetic Polynucleotide
ccgcccactctaaagata

SEQ ID NO: 9735 - DNA, 18 bp, Artificial Sequence
  Synthetic Polynucleotide
ttaacgcctcgtccttct

SEQ ID NO: 9736 - DNA, 18 bp, Artificial Sequence
  Synthetic Polynucleotide
tggcgagggtcacattga

SEQ ID NO: 9737 - DNA, 18 bp, Artificial Sequence
  Synthetic Polynucleotide
taataagcaatgacggca

SEQ ID NO: 9738 - DNA, 18 bp, Artificial Sequence
  Synthetic Polynucleotide
taaatcgaagtggactgc

SEQ ID NO: 9739 - DNA, 18 bp, Artificial Sequence
  Synthetic Polynucleotide
accgcctacataccagag

SEQ ID NO: 9740 - DNA, 17 bp, Artificial Sequence
  Synthetic Polynucleotide
tcctgctcctgttgagt

SEQ ID NO: 9741 - DNA, 17 bp, Artificial Sequence
  Synthetic Polynucleotide
atccaatcgctgtacca

SEQ ID NO: 9742 - DNA, 17 bp, Artificial Sequence
  Synthetic Polynucleotide
ggaggttcttcaactcc

SEQ ID NO: 9743 - DNA, 17 bp, Artificial Sequence
  Synthetic Polynucleotide
atctcggaaacctgctg

SEQ ID NO: 9744 - DNA, 18 bp, Artificial Sequence
  Synthetic Polynucleotide
gcgacttcacgccagaat

SEQ ID NO: 9745 - DNA, 17 bp, Artificial Sequence
  Synthetic Polynucleotide
tggtttgccatactgca

SEQ ID NO: 9746 - DNA, 17 bp, Artificial Sequence
  Synthetic Polynucleotide
ctacccgcactcgtagc

SEQ ID NO: 9747 - DNA, 18 bp, Artificial Sequence
  Synthetic Polynucleotide
cctttagcacccttagca

SEQ ID NO: 9748 - DNA, 17 bp, Artificial Sequence
  Synthetic Polynucleotide
gcttctgctgttcagga

SEQ ID NO: 9749 - DNA, 17 bp, Artificial Sequence
  Synthetic Polynucleotide
taaccctaattccagga

SEQ ID NO: 9750 - DNA, 18 bp, Artificial Sequence
  Synthetic Polynucleotide
cagacgcctgtttatcct

SEQ ID NO: 9751 - DNA, 18 bp, Artificial Sequence
  Synthetic Polynucleotide
cttcacggttgatttcca

SEQ ID NO: 9752 - DNA, 17 bp, Artificial Sequence
  Synthetic Polynucleotide
gctgaaggtatggctac

SEQ ID NO: 9753 - DNA, 18 bp, Artificial Sequence
  Synthetic Polynucleotide
cccgttcgaggagctgca

SEQ ID NO: 9754 - DNA, 18 bp, Artificial Sequence
  Synthetic Polynucleotide
ccattgcggttttcattt

SEQ ID NO: 9755 - DNA, 18 bp, Artificial Sequence
  Synthetic Polynucleotide
gacgttttgatcgtcagc

SEQ ID NO: 9756 - DNA, 17 bp, Artificial Sequence
  Synthetic Polynucleotide
ccgaggatgatctgatc

SEQ ID NO: 9757 - DNA, 18 bp, Artificial Sequence
  Synthetic Polynucleotide
aacgaattgtggttgttg

SEQ ID NO: 9758 - DNA, 18 bp, Artificial Sequence
  Synthetic Polynucleotide
tgcaagacaacagcggta

SEQ ID NO: 9759 - DNA, 18 bp, Artificial Sequence
  Synthetic Polynucleotide
aagaatgatgcacgtttc

SEQ ID NO: 9760 - DNA, 18 bp, Artificial Sequence
  Synthetic Polynucleotide
aagaacatcgactccaag

SEQ ID NO: 9761 - DNA, 17 bp, Artificial Sequence
  Synthetic Polynucleotide
aggtagcgtaacactgg

SEQ ID NO: 9762 - DNA, 17 bp, Artificial Sequence
  Synthetic Polynucleotide
aatgtaacccttggtgc

SEQ ID NO: 9763 - DNA, 17 bp, Artificial Sequence
  Synthetic Polynucleotide
actccgaagtattgggc

SEQ ID NO: 9764 - DNA, 18 bp, Artificial Sequence
  Synthetic Polynucleotide
tatcgtctgggaaaatgt

SEQ ID NO: 9765 - DNA, 17 bp, Artificial Sequence
  Synthetic Polynucleotide
atcttgtcatgggcttt

SEQ ID NO: 9766 - DNA, 17 bp, Artificial Sequence
  Synthetic Polynucleotide
tgccttttgtgtgggta

SEQ ID NO: 9767 - DNA, 18 bp, Artificial Sequence
  Synthetic Polynucleotide
ttgcgacacgtttacctt

SEQ ID NO: 9768 - DNA, 18 bp, Artificial Sequence
  Synthetic Polynucleotide
tattttatttggtgcggt

SEQ ID NO: 9769 - DNA, 17 bp, Artificial Sequence
  Synthetic Polynucleotide
tttgccttttgaggtgg

SEQ ID NO: 9770 - DNA, 18 bp, Artificial Sequence
  Synthetic Polynucleotide
agtgcgaagaattgtgga

SEQ ID NO: 9771 - DNA, 17 bp, Artificial Sequence
  Synthetic Polynucleotide
ttgatcgtttccgaagt

SEQ ID NO: 9772 - DNA, 17 bp, Artificial Sequence
  Synthetic Polynucleotide
atctcgttttggcttcg

SEQ ID NO: 9773 - DNA, 17 bp, Artificial Sequence
  Synthetic Polynucleotide
ggtagtctctaggtggc

SEQ ID NO: 9774 - DNA, 18 bp, Artificial Sequence
  Synthetic Polynucleotide
acctttcatgtgattggg

SEQ ID NO: 9775 - DNA, 17 bp, Artificial Sequence
  Synthetic Polynucleotide
gttcctgggatttgctg

SEQ ID NO: 9776 - DNA, 17 bp, Artificial Sequence
  Synthetic Polynucleotide
cgaaatggatgctggta

SEQ ID NO: 9777 - DNA, 17 bp, Artificial Sequence
  Synthetic Polynucleotide
tgagggctgggacagta

SEQ ID NO: 9778 - DNA, 17 bp, Artificial Sequence
  Synthetic Polynucleotide
ttataaagcgggtgccg

SEQ ID NO: 9779 - DNA, 18 bp, Artificial Sequence
  Synthetic Polynucleotide
ccgataaggaagtggaag

SEQ ID NO: 9780 - DNA, 17 bp, Artificial Sequence
  Synthetic Polynucleotide
tatcctatctgggaagc

SEQ ID NO: 9781 - DNA, 17 bp, Artificial Sequence
  Synthetic Polynucleotide
gccgactcgtagatcgt

SEQ ID NO: 9782 - DNA, 17 bp, Artificial Sequence
  Synthetic Polynucleotide
atggggattcagagcta

SEQ ID NO: 9783 - DNA, 17 bp, Artificial Sequence
  Synthetic Polynucleotide
tacgactatctgcaaga

SEQ ID NO: 9784 - DNA, 17 bp, Artificial Sequence
  Synthetic Polynucleotide
tacgttcaactttgccg

SEQ ID NO: 9785 - DNA, 17 bp, Artificial Sequence
  Synthetic Polynucleotide
cgttcggtttcctgaac

SEQ ID NO: 9786 - DNA, 18 bp, Artificial Sequence
  Synthetic Polynucleotide
ttgttcgacttgatgcga

SEQ ID NO: 9787 - DNA, 18 bp, Artificial Sequence
  Synthetic Polynucleotide
cacattggtagcgttggt

SEQ ID NO: 9788 - DNA, 18 bp, Artificial Sequence
  Synthetic Polynucleotide
tttggtgggtatctcgtt

SEQ ID NO: 9789 - DNA, 18 bp, Artificial Sequence
  Synthetic Polynucleotide
ctcactatgcggtctaac

SEQ ID NO: 9790 - DNA, 18 bp, Artificial Sequence
  Synthetic Polynucleotide
ggtcaggttagtgcgtat

SEQ ID NO: 9791 - DNA, 17 bp, Artificial Sequence
  Synthetic Polynucleotide
tctcctttgttctctgc

SEQ ID NO: 9792 - DNA, 18 bp, Artificial Sequence
  Synthetic Polynucleotide
ttctggctatggtaagga

SEQ ID NO: 9793 - DNA, 18 bp, Artificial Sequence
  Synthetic Polynucleotide
aatggtgctaaaagtcca

SEQ ID NO: 9794 - DNA, 18 bp, Artificial Sequence
  Synthetic Polynucleotide
cgattgattggtggcata

SEQ ID NO: 9795 - DNA, 18 bp, Artificial Sequence
  Synthetic Polynucleotide
tgtctgcgtttggtttca

SEQ ID NO: 9796 - DNA, 18 bp, Artificial Sequence
  Synthetic Polynucleotide
acgtttggctatacaagg

SEQ ID NO: 9797 - DNA, 18 bp, Artificial Sequence
  Synthetic Polynucleotide
ttgttgggtgagtttagt

SEQ ID NO: 9798 - DNA, 18 bp, Artificial Sequence
  Synthetic Polynucleotide
ggcgtagtaaattctgtc

SEQ ID NO: 9799 - DNA, 18 bp, Artificial Sequence
  Synthetic Polynucleotide
acccttttattgggtgga

SEQ ID NO: 9800 - DNA, 17 bp, Artificial Sequence
  Synthetic Polynucleotide
gtggctagtatgggata

SEQ ID NO: 9801 - DNA, 18 bp, Artificial Sequence
  Synthetic Polynucleotide
aatgactggtaatctgga

SEQ ID NO: 9802 - DNA, 17 bp, Artificial Sequence
  Synthetic Polynucleotide
attaactgggtggggat

SEQ ID NO: 9803 - DNA, 18 bp, Artificial Sequence
  Synthetic Polynucleotide
gattggtatctgattgcc

SEQ ID NO: 9804 - DNA, 17 bp, Artificial Sequence
  Synthetic Polynucleotide
cggcgtaattaaagagc

SEQ ID NO: 9805 - DNA, 18 bp, Artificial Sequence
  Synthetic Polynucleotide
tgtttggttttgaagagc

SEQ ID NO: 9806 - DNA, 18 bp, Artificial Sequence
  Synthetic Polynucleotide
agagttgccttttgaatg

SEQ ID NO: 9807 - DNA, 18 bp, Artificial Sequence
  Synthetic Polynucleotide
gtgcgtttaaagaagacg

SEQ ID NO: 9808 - DNA, 18 bp, Artificial Sequence
  Synthetic Polynucleotide
ttctttcagtttgtgcgt

SEQ ID NO: 9809 - DNA, 18 bp, Artificial Sequence
  Synthetic Polynucleotide
ggcattaaatttggcgta

SEQ ID NO: 9810 - DNA, 17 bp, Artificial Sequence
  Synthetic Polynucleotide
tggggcttggtttcatt

SEQ ID NO: 9811 - DNA, 17 bp, Artificial Sequence
  Synthetic Polynucleotide
caattgtttggcgtcaa

SEQ ID NO: 9812 - DNA, 17 bp, Artificial Sequence
  Synthetic Polynucleotide
ctttgcgactggtactg

SEQ ID NO: 9813 - DNA, 17 bp, Artificial Sequence
  Synthetic Polynucleotide
cgcgatattgtgtgaaa

SEQ ID NO: 9814 - DNA, 17 bp, Artificial Sequence
  Synthetic Polynucleotide
gttcttgactggttcga

SEQ ID NO: 9815 - DNA, 17 bp, Artificial Sequence
  Synthetic Polynucleotide
ctcagagtagaagtgcg

SEQ ID NO: 9816 - DNA, 17 bp, Artificial Sequence
  Synthetic Polynucleotide
cacatctgcctctgtag

SEQ ID NO: 9817 - DNA, 18 bp, Artificial Sequence
  Synthetic Polynucleotide
tgattgaagagctggaac

SEQ ID NO: 9818 - DNA, 17 bp, Artificial Sequence
  Synthetic Polynucleotide
tcctgtggttcctgtga

SEQ ID NO: 9819 - DNA, 18 bp, Artificial Sequence
  Synthetic Polynucleotide
tggtctgtttggatttcg

SEQ ID NO: 9820 - DNA, 17 bp, Artificial Sequence
  Synthetic Polynucleotide
aactggtctgtgtatcc

SEQ ID NO: 9821 - DNA, 17 bp, Artificial Sequence
  Synthetic Polynucleotide
acttaaagtatggggcg

SEQ ID NO: 9822 - DNA, 18 bp, Artificial Sequence
  Synthetic Polynucleotide
ttcgtttggcatattgta

SEQ ID NO: 9823 - DNA, 18 bp, Artificial Sequence
  Synthetic Polynucleotide
gactggtagactccatcc

SEQ ID NO: 9824 - DNA, 17 bp, Artificial Sequence
  Synthetic Polynucleotide
agtggttggacactctc

SEQ ID NO: 9825 - DNA, 18 bp, Artificial Sequence
  Synthetic Polynucleotide
gcacgttgggatgaattc

SEQ ID NO: 9826 - DNA, 18 bp, Artificial Sequence
  Synthetic Polynucleotide
gtcatcactccataaccc

SEQ ID NO: 9827 - DNA, 17 bp, Artificial Sequence
  Synthetic Polynucleotide
tttgagctggaagttca

SEQ ID NO: 9828 - DNA, 18 bp, Artificial Sequence
  Synthetic Polynucleotide
gaggttcctgaaggtatc

SEQ ID NO: 9829 - DNA, 18 bp, Artificial Sequence
  Synthetic Polynucleotide
ttcacgaatcacagatcc

SEQ ID NO: 9830 - DNA, 18 bp, Artificial Sequence
  Synthetic Polynucleotide
ggggcttagtattacccc

SEQ ID NO: 9831 - DNA, 17 bp, Artificial Sequence
  Synthetic Polynucleotide
tcactagcatcacagat

SEQ ID NO: 9832 - DNA, 18 bp, Artificial Sequence
  Synthetic Polynucleotide
gggatcagagacatttga

SEQ ID NO: 9833 - DNA, 18 bp, Artificial Sequence
  Synthetic Polynucleotide
agcaccagcatataactt

SEQ ID NO: 9834 - DNA, 18 bp, Artificial Sequence
  Synthetic Polynucleotide
acaattctgtcctcactt

SEQ ID NO: 9835 - DNA, 18 bp, Artificial Sequence
  Synthetic Polynucleotide
tgttcttcggagatgatg

SEQ ID NO: 9836 - DNA, 18 bp, Artificial Sequence
  Synthetic Polynucleotide
tatattcagtgcagcatc

SEQ ID NO: 9837 - DNA, 17 bp, Artificial Sequence
  Synthetic Polynucleotide
cggggcttagtattacc

SEQ ID NO: 9838 - DNA, 17 bp, Artificial Sequence
  Synthetic Polynucleotide
caacaattcatcctgcc

SEQ ID NO: 9839 - DNA, 17 bp, Artificial Sequence
  Synthetic Polynucleotide
cccagaagagatgaagc

SEQ ID NO: 9840 - DNA, 18 bp, Artificial Sequence
  Synthetic Polynucleotide
tcgacgcatattgctcac

SEQ ID NO: 9841 - DNA, 18 bp, Artificial Sequence
  Synthetic Polynucleotide
aacatacaacacgctatg

SEQ ID NO: 9842 - DNA, 18 bp, Artificial Sequence
  Synthetic Polynucleotide
gcggggcatagtattacc

SEQ ID NO: 9843 - DNA, 17 bp, Artificial Sequence
  Synthetic Polynucleotide
taaagggcaaaatagga

SEQ ID NO: 9844 - DNA, 18 bp, Artificial Sequence
  Synthetic Polynucleotide
cctcgcttaccctcctcg

SEQ ID NO: 9845 - DNA, 17 bp, Artificial Sequence
  Synthetic Polynucleotide
gtctttccttctcctcc

SEQ ID NO: 9846 - DNA, 18 bp, Artificial Sequence
  Synthetic Polynucleotide
ccttcgagtttggttcat

SEQ ID NO: 9847 - DNA, 18 bp, Artificial Sequence
  Synthetic Polynucleotide
aaatggacggtagataga

SEQ ID NO: 9848 - DNA, 17 bp, Artificial Sequence
  Synthetic Polynucleotide
gcacgcaaccactttcc

SEQ ID NO: 9849 - DNA, 17 bp, Artificial Sequence
  Synthetic Polynucleotide
tctccccaccttttagt

SEQ ID NO: 9850 - DNA, 18 bp, Artificial Sequence
  Synthetic Polynucleotide
cagcaacaactgtaatga

SEQ ID NO: 9851 - DNA, 18 bp, Artificial Sequence
  Synthetic Polynucleotide
cgtctttccttctcctcc

SEQ ID NO: 9852 - DNA, 18 bp, Artificial Sequence
  Synthetic Polynucleotide
cagaaacacctccaggga

SEQ ID NO: 9853 - DNA, 18 bp, Artificial Sequence
  Synthetic Polynucleotide
agagagtacctcatcaca

SEQ ID NO: 9854 - DNA, 18 bp, Artificial Sequence
  Synthetic Polynucleotide
ggggcttattattacccc

SEQ ID NO: 9855 - DNA, 18 bp, Artificial Sequence
  Synthetic Polynucleotide
ctttcctcctccaacaat

SEQ ID NO: 9856 - DNA, 17 bp, Artificial Sequence
  Synthetic Polynucleotide
aacgaatctgacggaag

SEQ ID NO: 9857 - DNA, 18 bp, Artificial Sequence
  Synthetic Polynucleotide
tccttctccaccttgtgg

SEQ ID NO: 9858 - DNA, 18 bp, Artificial Sequence
  Synthetic Polynucleotide
cgagagagttcaatacgc

SEQ ID NO: 9859 - DNA, 17 bp, Artificial Sequence
  Synthetic Polynucleotide
cttgggttttacctcca

SEQ ID NO: 9860 - DNA, 17 bp, Artificial Sequence
  Synthetic Polynucleotide
ggctttccctatacgct

SEQ ID NO: 9861 - DNA, 18 bp, Artificial Sequence
  Synthetic Polynucleotide
catactcagacgctactc

SEQ ID NO: 9862 - DNA, 18 bp, Artificial Sequence
  Synthetic Polynucleotide
tacagggctttattcaga

SEQ ID NO: 9863 - DNA, 18 bp, Artificial Sequence
  Synthetic Polynucleotide
cccaggaatataacacgc

SEQ ID NO: 9864 - DNA, 18 bp, Artificial Sequence
  Synthetic Polynucleotide
agaagagacatcaagctc

SEQ ID NO: 9865 - DNA, 18 bp, Artificial Sequence
  Synthetic Polynucleotide
ttcgtagtttcctcgccg

SEQ ID NO: 9866 - DNA, 17 bp, Artificial Sequence
  Synthetic Polynucleotide
agggtaatgggtggcgt

SEQ ID NO: 9867 - DNA, 17 bp, Artificial Sequence
  Synthetic Polynucleotide
tccacaggaaagccatt

SEQ ID NO: 9868 - DNA, 18 bp, Artificial Sequence
  Synthetic Polynucleotide
ccacaaaggtaacgagta

SEQ ID NO: 9869 - DNA, 17 bp, Artificial Sequence
  Synthetic Polynucleotide
atttcttcgagtgtccc

SEQ ID NO: 9870 - DNA, 17 bp, Artificial Sequence
  Synthetic Polynucleotide
agcggaacgagtttccc

SEQ ID NO: 9871 - DNA, 17 bp, Artificial Sequence
  Synthetic Polynucleotide
tgacgaggaagtgtcgg

SEQ ID NO: 9872 - DNA, 18 bp, Artificial Sequence
  Synthetic Polynucleotide
ctaagcgtagtttcccca

SEQ ID NO: 9873 - DNA, 17 bp, Artificial Sequence
  Synthetic Polynucleotide
atactgaaggttggtgc

SEQ ID NO: 9874 - DNA, 17 bp, Artificial Sequence
  Synthetic Polynucleotide
tataggttgaaggcagt

SEQ ID NO: 9875 - DNA, 17 bp, Artificial Sequence
  Synthetic Polynucleotide
ttctgataggtgaccgt

SEQ ID NO: 9876 - DNA, 17 bp, Artificial Sequence
  Synthetic Polynucleotide
ccattaggcgagctttt

SEQ ID NO: 9877 - DNA, 17 bp, Artificial Sequence
  Synthetic Polynucleotide
tcatcagttcggatcaa

SEQ ID NO: 9878 - DNA, 18 bp, Artificial Sequence
  Synthetic Polynucleotide
tttcaagggatagcctcc

SEQ ID NO: 9879 - DNA, 18 bp, Artificial Sequence
  Synthetic Polynucleotide
attggtgatggtttcaag

SEQ ID NO: 9880 - DNA, 18 bp, Artificial Sequence
  Synthetic Polynucleotide
aatctttcaggtcaggca

SEQ ID NO: 9881 - DNA, 18 bp, Artificial Sequence
  Synthetic Polynucleotide
aatgggagcgtatactag

SEQ ID NO: 9882 - DNA, 18 bp, Artificial Sequence
  Synthetic Polynucleotide
ccgtcaattatggcgaaa

SEQ ID NO: 9883 - DNA, 17 bp, Artificial Sequence
  Synthetic Polynucleotide
caagcactggctattga

SEQ ID NO: 9884 - DNA, 17 bp, Artificial Sequence
  Synthetic Polynucleotide
gactgcacggaagccgg

SEQ ID NO: 9885 - DNA, 17 bp, Artificial Sequence
  Synthetic Polynucleotide
aagttccactgagctgg

SEQ ID NO: 9886 - DNA, 18 bp, Artificial Sequence
  Synthetic Polynucleotide
cgactgcaccacgagttg

SEQ ID NO: 9887 - DNA, 17 bp, Artificial Sequence
  Synthetic Polynucleotide
caatgtgccccgcaaac

SEQ ID NO: 9888 - DNA, 18 bp, Artificial Sequence
  Synthetic Polynucleotide
catcaacaccgacgatga

SEQ ID NO: 9889 - DNA, 18 bp, Artificial Sequence
  Synthetic Polynucleotide
aaaccatttccacttcgc

SEQ ID NO: 9890 - DNA, 17 bp, Artificial Sequence
  Synthetic Polynucleotide
acccacgttcatggaag

SEQ ID NO: 9891 - DNA, 17 bp, Artificial Sequence
  Synthetic Polynucleotide
acaacaacccaaacagc

SEQ ID NO: 9892 - DNA, 18 bp, Artificial Sequence
  Synthetic Polynucleotide
tccgactacctcgccacc

SEQ ID NO: 9893 - DNA, 18 bp, Artificial Sequence
  Synthetic Polynucleotide
tacacctcacaaccaata

SEQ ID NO: 9894 - DNA, 18 bp, Artificial Sequence
  Synthetic Polynucleotide
aatcaaacccacaaggaa

SEQ ID NO: 9895 - DNA, 18 bp, Artificial Sequence
  Synthetic Polynucleotide
tagcatgttcaccaatct

SEQ ID NO: 9896 - DNA, 18 bp, Artificial Sequence
  Synthetic Polynucleotide
acacgagcaagaaaagtc

SEQ ID NO: 9897 - DNA, 18 bp, Artificial Sequence
  Synthetic Polynucleotide
actaaaccagacctctca

SEQ ID NO: 9898 - DNA, 18 bp, Artificial Sequence
  Synthetic Polynucleotide
tttctcctagacgctgat

SEQ ID NO: 9899 - DNA, 18 bp, Artificial Sequence
  Synthetic Polynucleotide
cctgagcccgcttactgg

SEQ ID NO: 9900 - DNA, 17 bp, Artificial Sequence
  Synthetic Polynucleotide
agagaaattccactgcc

SEQ ID NO: 9901 - DNA, 17 bp, Artificial Sequence
  Synthetic Polynucleotide
gacgttaatgccatcac

SEQ ID NO: 9902 - DNA, 17 bp, Artificial Sequence
  Synthetic Polynucleotide
ggtaacattttgccctg

SEQ ID NO: 9903 - DNA, 17 bp, Artificial Sequence
  Synthetic Polynucleotide
gttctaccaacaccagg

SEQ ID NO: 9904 - DNA, 18 bp, Artificial Sequence
  Synthetic Polynucleotide
cttgaactgaacccgaaa

SEQ ID NO: 9905 - DNA, 18 bp, Artificial Sequence
  Synthetic Polynucleotide
ttgctgcccctgatttta

SEQ ID NO: 9906 - DNA, 17 bp, Artificial Sequence
  Synthetic Polynucleotide
cgctcactgggcacggt

SEQ ID NO: 9907 - DNA, 17 bp, Artificial Sequence
  Synthetic Polynucleotide
tggctaaagacaagacc

SEQ ID NO: 9908 - DNA, 18 bp, Artificial Sequence
  Synthetic Polynucleotide
catccacataggctctaa

SEQ ID NO: 9909 - DNA, 17 bp, Artificial Sequence
  Synthetic Polynucleotide
tgggattcctttcgtca

SEQ ID NO: 9910 - DNA, 17 bp, Artificial Sequence
  Synthetic Polynucleotide
cgccattttccgtttct

SEQ ID NO: 9911 - DNA, 18 bp, Artificial Sequence
  Synthetic Polynucleotide
aacacagttcgagtctct

SEQ ID NO: 9912 - DNA, 18 bp, Artificial Sequence
  Synthetic Polynucleotide
attgttctttgtgtgacc

SEQ ID NO: 9913 - DNA, 17 bp, Artificial Sequence
  Synthetic Polynucleotide
tggatgtcaatccgact

SEQ ID NO: 9914 - DNA, 18 bp, Artificial Sequence
  Synthetic Polynucleotide
gcttctcagttcaagagt

SEQ ID NO: 9915 - DNA, 17 bp, Artificial Sequence
  Synthetic Polynucleotide
agcttcatcagagggac

SEQ ID NO: 9916 - DNA, 18 bp, Artificial Sequence
  Synthetic Polynucleotide
catgtatgcaaccatcaa

SEQ ID NO: 9917 - DNA, 18 bp, Artificial Sequence
  Synthetic Polynucleotide
aaaacatggaacctttgg

SEQ ID NO: 9918 - DNA, 18 bp, Artificial Sequence
  Synthetic Polynucleotide
cccaaccattttctatga

SEQ ID NO: 9919 - DNA, 17 bp, Artificial Sequence
  Synthetic Polynucleotide
tgcatcactccaaatgg

SEQ ID NO: 9920 - DNA, 18 bp, Artificial Sequence
  Synthetic Polynucleotide
ccattgatacaaacgcat

SEQ ID NO: 9921 - DNA, 17 bp, Artificial Sequence
  Synthetic Polynucleotide
tggtccagctcaagttg

SEQ ID NO: 9922 - DNA, 17 bp, Artificial Sequence
  Synthetic Polynucleotide
cctctccagaaattccg

SEQ ID NO: 9923 - DNA, 17 bp, Artificial Sequence
  Synthetic Polynucleotide
caaggcaccaaacgatc

SEQ ID NO: 9924 - DNA, 17 bp, Artificial Sequence
  Synthetic Polynucleotide
tcttctgaatactgcgg

SEQ ID NO: 9925 - DNA, 18 bp, Artificial Sequence
  Synthetic Polynucleotide
cagcttagggataatgca

SEQ ID NO: 9926 - DNA, 17 bp, Artificial Sequence
  Synthetic Polynucleotide
tccaagcgaatctctgt

SEQ ID NO: 9927 - DNA, 18 bp, Artificial Sequence
  Synthetic Polynucleotide
tctcttccaggacatact

SEQ ID NO: 9928 - DNA, 17 bp, Artificial Sequence
  Synthetic Polynucleotide
gcatcaggataacagga

SEQ ID NO: 9929 - DNA, 18 bp, Artificial Sequence
  Synthetic Polynucleotide
gggcaattcatctctttg

SEQ ID NO: 9930 - DNA, 18 bp, Artificial Sequence
  Synthetic Polynucleotide
gaattcaaaacacccgtt

SEQ ID NO: 9931 - DNA, 18 bp, Artificial Sequence
  Synthetic Polynucleotide
gaacactcaattcacagc

SEQ ID NO: 9932 - DNA, 17 bp, Artificial Sequence
  Synthetic Polynucleotide
cccatcatcattccagg

SEQ ID NO: 9933 - DNA, 18 bp, Artificial Sequence
  Synthetic Polynucleotide
agaactcaaatacctgca

SEQ ID NO: 9934 - DNA, 18 bp, Artificial Sequence
  Synthetic Polynucleotide
ccatccgaattcttttgg

SEQ ID NO: 9935 - DNA, 17 bp, Artificial Sequence
  Synthetic Polynucleotide
gtgctaattgggcaagg

SEQ ID NO: 9936 - DNA, 17 bp, Artificial Sequence
  Synthetic Polynucleotide
gaaatgctgctcccact

SEQ ID NO: 9937 - DNA, 17 bp, Artificial Sequence
  Synthetic Polynucleotide
gattggtcagggtacag

SEQ ID NO: 9938 - DNA, 17 bp, Artificial Sequence
  Synthetic Polynucleotide
ttccattcaagtccacc

SEQ ID NO: 9939 - DNA, 17 bp, Artificial Sequence
  Synthetic Polynucleotide
tccaacacgataacctc

SEQ ID NO: 9940 - DNA, 18 bp, Artificial Sequence
  Synthetic Polynucleotide
gaacaccattgctacaat

SEQ ID NO: 9941 - DNA, 17 bp, Artificial Sequence
  Synthetic Polynucleotide
acaggcaacctccaaac

SEQ ID NO: 9942 - DNA, 18 bp, Artificial Sequence
  Synthetic Polynucleotide
ggctcacttttgttgtga

SEQ ID NO: 9943 - DNA, 18 bp, Artificial Sequence
  Synthetic Polynucleotide
tgccaccataaactttga

SEQ ID NO: 9944 - DNA, 17 bp, Artificial Sequence
  Synthetic Polynucleotide
gccatcaactccgatat

SEQ ID NO: 9945 - DNA, 17 bp, Artificial Sequence
  Synthetic Polynucleotide
acactttgctctaaccc

SEQ ID NO: 9946 - DNA, 17 bp, Artificial Sequence
  Synthetic Polynucleotide
tcctttcgtcagtccga

SEQ ID NO: 9947 - DNA, 17 bp, Artificial Sequence
  Synthetic Polynucleotide
cctgcaatcattccttc

SEQ ID NO: 9948 - DNA, 17 bp, Artificial Sequence
  Synthetic Polynucleotide
aagttcacctcatctgc

SEQ ID NO: 9949 - DNA, 17 bp, Artificial Sequence
  Synthetic Polynucleotide
gccattgctcttcctat

SEQ ID NO: 9950 - DNA, 18 bp, Artificial Sequence
  Synthetic Polynucleotide
ggcaccttttacaagatg

SEQ ID NO: 9951 - DNA, 17 bp, Artificial Sequence
  Synthetic Polynucleotide
gcacttccatcagtcat

SEQ ID NO: 9952 - DNA, 17 bp, Artificial Sequence
  Synthetic Polynucleotide
ttgggaaccaaacaagt

SEQ ID NO: 9953 - DNA, 17 bp, Artificial Sequence
  Synthetic Polynucleotide
tcctttgcaattccttc

SEQ ID NO: 9954 - DNA, 17 bp, Artificial Sequence
  Synthetic Polynucleotide
cagcgagatcttcagtg

SEQ ID NO: 9955 - DNA, 18 bp, Artificial Sequence
  Synthetic Polynucleotide
tcaaatgcttcaaatgca

SEQ ID NO: 9956 - DNA, 18 bp, Artificial Sequence
  Synthetic Polynucleotide
tttctcaagacactagga

SEQ ID NO: 9957 - DNA, 18 bp, Artificial Sequence
  Synthetic Polynucleotide
tccattccccatttcatt

SEQ ID NO: 9958 - DNA, 18 bp, Artificial Sequence
  Synthetic Polynucleotide
aaggacaatctcatctga

SEQ ID NO: 9959 - DNA, 18 bp, Artificial Sequence
  Synthetic Polynucleotide
cccaacacggtagatagc

SEQ ID NO: 9960 - DNA, 18 bp, Artificial Sequence
  Synthetic Polynucleotide
tgaaggctcaaatacctt

SEQ ID NO: 9961 - DNA, 18 bp, Artificial Sequence
  Synthetic Polynucleotide
atgctagagtcccgtttc

SEQ ID NO: 9962 - DNA, 18 bp, Artificial Sequence
  Synthetic Polynucleotide
taaaacttctcccctttg

SEQ ID NO: 9963 - DNA, 17 bp, Artificial Sequence
  Synthetic Polynucleotide
ggtagtggtccatcaat

SEQ ID NO: 9964 - DNA, 17 bp, Artificial Sequence
  Synthetic Polynucleotide
agatcctccatacagcc

SEQ ID NO: 9965 - DNA, 17 bp, Artificial Sequence
  Synthetic Polynucleotide
cctttcactgctgctcc

SEQ ID NO: 9966 - DNA, 18 bp, Artificial Sequence
  Synthetic Polynucleotide
gtctcaaggcaccaaacg

SEQ ID NO: 9967 - DNA, 18 bp, Artificial Sequence
  Synthetic Polynucleotide
tgtaagacacattccaga

SEQ ID NO: 9968 - DNA, 18 bp, Artificial Sequence
  Synthetic Polynucleotide
caaactccacagaaactg

SEQ ID NO: 9969 - DNA, 17 bp, Artificial Sequence
  Synthetic Polynucleotide
accattcttccaacaga

SEQ ID NO: 9970 - DNA, 18 bp, Artificial Sequence
  Synthetic Polynucleotide
cattactgcttctccaag

SEQ ID NO: 9971 - DNA, 18 bp, Artificial Sequence
  Synthetic Polynucleotide
ccttcttttccaggacat

SEQ ID NO: 9972 - DNA, 17 bp, Artificial Sequence
  Synthetic Polynucleotide
tgcttttcaacctcagt

SEQ ID NO: 9973 - DNA, 17 bp, Artificial Sequence
  Synthetic Polynucleotide
tcaggcatcaaaatgca

SEQ ID NO: 9974 - DNA, 18 bp, Artificial Sequence
  Synthetic Polynucleotide
cccttatcatctcaaccc

SEQ ID NO: 9975 - DNA, 17 bp, Artificial Sequence
  Synthetic Polynucleotide
gaatgctcatgctaccc

SEQ ID NO: 9976 - DNA, 18 bp, Artificial Sequence
  Synthetic Polynucleotide
ccttatgctctccataca

SEQ ID NO: 9977 - DNA, 17 bp, Artificial Sequence
  Synthetic Polynucleotide
ctgccattccaaaacat

SEQ ID NO: 9978 - DNA, 17 bp, Artificial Sequence
  Synthetic Polynucleotide
atgctagagtcccgttt

SEQ ID NO: 9979 - DNA, 18 bp, Artificial Sequence
  Synthetic Polynucleotide
tacaataaggcaaccaaa

SEQ ID NO: 9980 - DNA, 17 bp, Artificial Sequence
  Synthetic Polynucleotide
ccaaccatcaaccattc

SEQ ID NO: 9981 - DNA, 18 bp, Artificial Sequence
  Synthetic Polynucleotide
tcattcttcaggaacatg

SEQ ID NO: 9982 - DNA, 18 bp, Artificial Sequence
  Synthetic Polynucleotide
tccagaaatccatcttcc

SEQ ID NO: 9983 - DNA, 17 bp, Artificial Sequence
  Synthetic Polynucleotide
aattctcaaggctcagg

SEQ ID NO: 9984 - DNA, 17 bp, Artificial Sequence
  Synthetic Polynucleotide
cgccaaactctccttat

SEQ ID NO: 9985 - DNA, 17 bp, Artificial Sequence
  Synthetic Polynucleotide
ggcaccaaacgatcata

SEQ ID NO: 9986 - DNA, 17 bp, Artificial Sequence
  Synthetic Polynucleotide
ccctgctcattgctatg

SEQ ID NO: 9987 - DNA, 17 bp, Artificial Sequence
  Synthetic Polynucleotide
ggtaactgcaacaccaa

SEQ ID NO: 9988 - DNA, 17 bp, Artificial Sequence
  Synthetic Polynucleotide
gcaatctgctcacaagt

SEQ ID NO: 9989 - DNA, 18 bp, Artificial Sequence
  Synthetic Polynucleotide
cgttctctctatcatccc

SEQ ID NO: 9990 - DNA, 17 bp, Artificial Sequence
  Synthetic Polynucleotide
caaggcaaccaagaggc

SEQ ID NO: 9991 - DNA, 18 bp, Artificial Sequence
  Synthetic Polynucleotide
ttggtccatcagtcatta

SEQ ID NO: 9992 - DNA, 18 bp, Artificial Sequence
  Synthetic Polynucleotide
caggcaattcctctctct

SEQ ID NO: 9993 - DNA, 18 bp, Artificial Sequence
  Synthetic Polynucleotide
ctcatcactgcttctcca

SEQ ID NO: 9994 - DNA, 18 bp, Artificial Sequence
  Synthetic Polynucleotide
ggtagactgctttctttg

SEQ ID NO: 9995 - DNA, 17 bp, Artificial Sequence
  Synthetic Polynucleotide
ggtccagcttctctaag

SEQ ID NO: 9996 - DNA, 18 bp, Artificial Sequence
  Synthetic Polynucleotide
tctcactatactccgaag

SEQ ID NO: 9997 - DNA, 18 bp, Artificial Sequence
  Synthetic Polynucleotide
gaccagaaattccgattg

SEQ ID NO: 9998 - DNA, 18 bp, Artificial Sequence
  Synthetic Polynucleotide
ccggcaattcatctcttt

SEQ ID NO: 9999 - DNA, 18 bp, Artificial Sequence
  Synthetic Polynucleotide
tacagaatcagctctctc

SEQ ID NO: 10000 - DNA, 17 bp, Artificial Sequence
  Synthetic Polynucleotide
tgctccaaacaatcctc

SEQ ID NO: 10001 - DNA, 18 bp, Artificial Sequence
  Synthetic Polynucleotide
tctgatccgtactcattg

SEQ ID NO: 10002 - DNA, 17 bp, Artificial Sequence
  Synthetic Polynucleotide
ccaaatgtcagacccca

SEQ ID NO: 10003 - DNA, 18 bp, Artificial Sequence
  Synthetic Polynucleotide
accatatcaccatcctga

SEQ ID NO: 10004 - DNA, 18 bp, Artificial Sequence
  Synthetic Polynucleotide
taggggaacactggggca

SEQ ID NO: 10005 - DNA, 18 bp, Artificial Sequence
  Synthetic Polynucleotide
cctggcacgcatctaaac

SEQ ID NO: 10006 - DNA, 18 bp, Artificial Sequence
  Synthetic Polynucleotide
gcaaactggaaatgcttt

SEQ ID NO: 10007 - DNA, 17 bp, Artificial Sequence
  Synthetic Polynucleotide
cattgaaacgctcgctg

SEQ ID NO: 10008 - DNA, 17 bp, Artificial Sequence
  Synthetic Polynucleotide
actgaccaaagctggaa

SEQ ID NO: 10009 - DNA, 17 bp, Artificial Sequence
  Synthetic Polynucleotide
aatcccgattctacctg

SEQ ID NO: 10010 - DNA, 18 bp, Artificial Sequence
  Synthetic Polynucleotide
aaaatggctgaaggtaca

SEQ ID NO: 10011 - DNA, 17 bp, Artificial Sequence
  Synthetic Polynucleotide
tcctctccctcgtcttc

SEQ ID NO: 10012 - DNA, 18 bp, Artificial Sequence
  Synthetic Polynucleotide
tacattgtcatgtatccc

SEQ ID NO: 10013 - DNA, 17 bp, Artificial Sequence
  Synthetic Polynucleotide
ggtaacactacgcctat

SEQ ID NO: 10014 - DNA, 18 bp, Artificial Sequence
  Synthetic Polynucleotide
ccaacctccacacctgtg

SEQ ID NO: 10015 - DNA, 17 bp, Artificial Sequence
  Synthetic Polynucleotide
gcaaacgccgtaaacgt

SEQ ID NO: 10016 - DNA, 17 bp, Artificial Sequence
  Synthetic Polynucleotide
tcctcttgcagtaagtc

SEQ ID NO: 10017 - DNA, 17 bp, Artificial Sequence
  Synthetic Polynucleotide
atgttttgcatgagcct

SEQ ID NO: 10018 - DNA, 18 bp, Artificial Sequence
  Synthetic Polynucleotide
tttctgctgtctttgtcg

SEQ ID NO: 10019 - DNA, 17 bp, Artificial Sequence
  Synthetic Polynucleotide
gtcttccactagctccc

SEQ ID NO: 10020 - DNA, 18 bp, Artificial Sequence
  Synthetic Polynucleotide
cgactcccgacgctggca

SEQ ID NO: 10021 - DNA, 17 bp, Artificial Sequence
  Synthetic Polynucleotide
tattccgattaaccgtg

SEQ ID NO: 10022 - DNA, 17 bp, Artificial Sequence
  Synthetic Polynucleotide
ctcctcttcgctttccg

SEQ ID NO: 10023 - DNA, 18 bp, Artificial Sequence
  Synthetic Polynucleotide
tggacgcactgaactttc

SEQ ID NO: 10024 - DNA, 17 bp, Artificial Sequence
  Synthetic Polynucleotide
caaatggctgatcctcc

SEQ ID NO: 10025 - DNA, 18 bp, Artificial Sequence
  Synthetic Polynucleotide
gggcttgtatttgttaga

SEQ ID NO: 10026 - DNA, 17 bp, Artificial Sequence
  Synthetic Polynucleotide
ccagaaacctggatcga

SEQ ID NO: 10027 - DNA, 18 bp, Artificial Sequence
  Synthetic Polynucleotide
cgggttcttcacaacact

SEQ ID NO: 10028 - DNA, 18 bp, Artificial Sequence
  Synthetic Polynucleotide
tacaccaagttgtcacta

SEQ ID NO: 10029 - DNA, 18 bp, Artificial Sequence
  Synthetic Polynucleotide
tctcctgttgatgtaact

SEQ ID NO: 10030 - DNA, 17 bp, Artificial Sequence
  Synthetic Polynucleotide
caatcaattgcactggc

SEQ ID NO: 10031 - DNA, 17 bp, Artificial Sequence
  Synthetic Polynucleotide
tggaaatgcttcttcca

SEQ ID NO: 10032 - DNA, 17 bp, Artificial Sequence
  Synthetic Polynucleotide
gccatatccactgtccg

SEQ ID NO: 10033 - DNA, 18 bp, Artificial Sequence
  Synthetic Polynucleotide
ggacctaaaacgaaagta

SEQ ID NO: 10034 - DNA, 18 bp, Artificial Sequence
  Synthetic Polynucleotide
agtattttctcctggcac

SEQ ID NO: 10035 - DNA, 18 bp, Artificial Sequence
  Synthetic Polynucleotide
gggaatcctgtatatgca

SEQ ID NO: 10036 - DNA, 18 bp, Artificial Sequence
  Synthetic Polynucleotide
gccacatatcatctgagt

SEQ ID NO: 10037 - DNA, 17 bp, Artificial Sequence
  Synthetic Polynucleotide
gggtttgttttgcatca

SEQ ID NO: 10038 - DNA, 18 bp, Artificial Sequence
  Synthetic Polynucleotide
cttcctacccaaccgatc

SEQ ID NO: 10039 - DNA, 18 bp, Artificial Sequence
  Synthetic Polynucleotide
tttctcctggcacgcatc

SEQ ID NO: 10040 - DNA, 17 bp, Artificial Sequence
  Synthetic Polynucleotide
ggtcctgggcacgcata

SEQ ID NO: 10041 - DNA, 17 bp, Artificial Sequence
  Synthetic Polynucleotide
tcccatcatactccact

SEQ ID NO: 10042 - DNA, 17 bp, Artificial Sequence
  Synthetic Polynucleotide
ccgctgttcaaatgaaa

SEQ ID NO: 10043 - DNA, 17 bp, Artificial Sequence
  Synthetic Polynucleotide
caatggcttccttagct

SEQ ID NO: 10044 - DNA, 18 bp, Artificial Sequence
  Synthetic Polynucleotide
ccatgtcaccatcctcaa

SEQ ID NO: 10045 - DNA, 18 bp, Artificial Sequence
  Synthetic Polynucleotide
gagtagagcacttacctg

SEQ ID NO: 10046 - DNA, 17 bp, Artificial Sequence
  Synthetic Polynucleotide
ctcctcctcctctggat

SEQ ID NO: 10047 - DNA, 18 bp, Artificial Sequence
  Synthetic Polynucleotide
aacagtcacctccacgca

SEQ ID NO: 10048 - DNA, 17 bp, Artificial Sequence
  Synthetic Polynucleotide
tcatcctcatcctctga

SEQ ID NO: 10049 - DNA, 18 bp, Artificial Sequence
  Synthetic Polynucleotide
tgtcctagatttgcaacc

SEQ ID NO: 10050 - DNA, 18 bp, Artificial Sequence
  Synthetic Polynucleotide
caacatccgttgacacca

SEQ ID NO: 10051 - DNA, 17 bp, Artificial Sequence
  Synthetic Polynucleotide
ctggcacgcatctaaac

SEQ ID NO: 10052 - DNA, 18 bp, Artificial Sequence
  Synthetic Polynucleotide
ctaaaatgtccaccgtta

SEQ ID NO: 10053 - DNA, 18 bp, Artificial Sequence
  Synthetic Polynucleotide
ccatatcaccatcctgaa

SEQ ID NO: 10054 - DNA, 17 bp, Artificial Sequence
  Synthetic Polynucleotide
cagagttttaagcaccg

SEQ ID NO: 10055 - DNA, 17 bp, Artificial Sequence
  Synthetic Polynucleotide
gcgcactgatgaatacg

SEQ ID NO: 10056 - DNA, 18 bp, Artificial Sequence
  Synthetic Polynucleotide
cacactatcaccacttgc

SEQ ID NO: 10057 - DNA, 17 bp, Artificial Sequence
  Synthetic Polynucleotide
ttgaaaatcccgccttt

SEQ ID NO: 10058 - DNA, 17 bp, Artificial Sequence
  Synthetic Polynucleotide
tgcacaccacttctagt

SEQ ID NO: 10059 - DNA, 18 bp, Artificial Sequence
  Synthetic Polynucleotide
tttaaagctacacctgga

SEQ ID NO: 10060 - DNA, 17 bp, Artificial Sequence
  Synthetic Polynucleotide
ttgtttcctccaatggg

SEQ ID NO: 10061 - DNA, 17 bp, Artificial Sequence
  Synthetic Polynucleotide
tcgagaacttccaaact

SEQ ID NO: 10062 - DNA, 18 bp, Artificial Sequence
  Synthetic Polynucleotide
gctcctcctcctcctcct

SEQ ID NO: 10063 - DNA, 18 bp, Artificial Sequence
  Synthetic Polynucleotide
gcgcttccttactaacct

SEQ ID NO: 10064 - DNA, 18 bp, Artificial Sequence
  Synthetic Polynucleotide
gagcacacgtatgtctga

SEQ ID NO: 10065 - DNA, 17 bp, Artificial Sequence
  Synthetic Polynucleotide
tttgaaaatcccgcctt

SEQ ID NO: 10066 - DNA, 17 bp, Artificial Sequence
  Synthetic Polynucleotide
tctactagctccgcctc

SEQ ID NO: 10067 - DNA, 17 bp, Artificial Sequence
  Synthetic Polynucleotide
atttgaaaatcccgcct

SEQ ID NO: 10068 - DNA, 18 bp, Artificial Sequence
  Synthetic Polynucleotide
cctcgtcttcttgatcac

SEQ ID NO: 10069 - DNA, 18 bp, Artificial Sequence
  Synthetic Polynucleotide
caccaagtccacctggga

SEQ ID NO: 10070 - DNA, 18 bp, Artificial Sequence
  Synthetic Polynucleotide
taacacttcatgatctcc

SEQ ID NO: 10071 - DNA, 18 bp, Artificial Sequence
  Synthetic Polynucleotide
acacgactccaacaataa

SEQ ID NO: 10072 - DNA, 18 bp, Artificial Sequence
  Synthetic Polynucleotide
tttctcttccttccacgt

SEQ ID NO: 10073 - DNA, 18 bp, Artificial Sequence
  Synthetic Polynucleotide
cacttgtatctagcacca

SEQ ID NO: 10074 - DNA, 18 bp, Artificial Sequence
  Synthetic Polynucleotide
ccctcctaagtagattgc

SEQ ID NO: 10075 - DNA, 17 bp, Artificial Sequence
  Synthetic Polynucleotide
cactacctcctggaatg

SEQ ID NO: 10076 - DNA, 17 bp, Artificial Sequence
  Synthetic Polynucleotide
ccactacgcattctcat

SEQ ID NO: 10077 - DNA, 17 bp, Artificial Sequence
  Synthetic Polynucleotide
taatccaccacacatcc

SEQ ID NO: 10078 - DNA, 17 bp, Artificial Sequence
  Synthetic Polynucleotide
tcaatcccacgaatacc

SEQ ID NO: 10079 - DNA, 17 bp, Artificial Sequence
  Synthetic Polynucleotide
ggcactcacattgtcta

SEQ ID NO: 10080 - DNA, 18 bp, Artificial Sequence
  Synthetic Polynucleotide
tacgccacatataactgg

SEQ ID NO: 10081 - DNA, 18 bp, Artificial Sequence
  Synthetic Polynucleotide
cacctcctgagtctccgc

SEQ ID NO: 10082 - DNA, 18 bp, Artificial Sequence
  Synthetic Polynucleotide
gtcaccatcctccaaggg

SEQ ID NO: 10083 - DNA, 18 bp, Artificial Sequence
  Synthetic Polynucleotide
tgcacaccgatgaattta

SEQ ID NO: 10084 - DNA, 17 bp, Artificial Sequence
  Synthetic Polynucleotide
cttccatcctcctcctc

SEQ ID NO: 10085 - DNA, 17 bp, Artificial Sequence
  Synthetic Polynucleotide
tccgcttaccgaatgta

SEQ ID NO: 10086 - DNA, 18 bp, Artificial Sequence
  Synthetic Polynucleotide
gtcacttgtaacactgtc

SEQ ID NO: 10087 - DNA, 18 bp, Artificial Sequence
  Synthetic Polynucleotide
gctcctatgtctttgaga

SEQ ID NO: 10088 - DNA, 18 bp, Artificial Sequence
  Synthetic Polynucleotide
atagaccaccgaagtata

SEQ ID NO: 10089 - DNA, 18 bp, Artificial Sequence
  Synthetic Polynucleotide
aaatcgctgtaattgtcg

SEQ ID NO: 10090 - DNA, 18 bp, Artificial Sequence
  Synthetic Polynucleotide
ccatatccgctgtcttgt

SEQ ID NO: 10091 - DNA, 17 bp, Artificial Sequence
  Synthetic Polynucleotide
gagcacacacgctgacc

SEQ ID NO: 10092 - DNA, 18 bp, Artificial Sequence
  Synthetic Polynucleotide
tatgtccaccatgtccga

SEQ ID NO: 10093 - DNA, 18 bp, Artificial Sequence
  Synthetic Polynucleotide
cggtcatccttattatgc

SEQ ID NO: 10094 - DNA, 17 bp, Artificial Sequence
  Synthetic Polynucleotide
tgaaaagtaaccgcctg

SEQ ID NO: 10095 - DNA, 18 bp, Artificial Sequence
  Synthetic Polynucleotide
cactagacaccacctctc

SEQ ID NO: 10096 - DNA, 17 bp, Artificial Sequence
  Synthetic Polynucleotide
ctcaaaagtccgcaatc

SEQ ID NO: 10097 - DNA, 17 bp, Artificial Sequence
  Synthetic Polynucleotide
gggtccgacacaaccga

SEQ ID NO: 10098 - DNA, 17 bp, Artificial Sequence
  Synthetic Polynucleotide
gcctacacctaatggct

SEQ ID NO: 10099 - DNA, 18 bp, Artificial Sequence
  Synthetic Polynucleotide
tatttcagaaaacgccga

SEQ ID NO: 10100 - DNA, 18 bp, Artificial Sequence
  Synthetic Polynucleotide
ggacacttcacctgatag

SEQ ID NO: 10101 - DNA, 17 bp, Artificial Sequence
  Synthetic Polynucleotide
gtacgcttctcttgctg

SEQ ID NO: 10102 - DNA, 18 bp, Artificial Sequence
  Synthetic Polynucleotide
tacttccactgtaacacc

SEQ ID NO: 10103 - DNA, 17 bp, Artificial Sequence
  Synthetic Polynucleotide
gtccaccaatgctaata

SEQ ID NO: 10104 - DNA, 18 bp, Artificial Sequence
  Synthetic Polynucleotide
ccaccacttgatctacca

SEQ ID NO: 10105 - DNA, 18 bp, Artificial Sequence
  Synthetic Polynucleotide
ccaccgactccgcatcca

SEQ ID NO: 10106 - DNA, 17 bp, Artificial Sequence
  Synthetic Polynucleotide
aattccccactgagcct

SEQ ID NO: 10107 - DNA, 17 bp, Artificial Sequence
  Synthetic Polynucleotide
aatatgcgtgccaccta

SEQ ID NO: 10108 - DNA, 17 bp, Artificial Sequence
  Synthetic Polynucleotide
gccatcccattgtcctt

SEQ ID NO: 10109 - DNA, 18 bp, Artificial Sequence
  Synthetic Polynucleotide
tgctttatgcctcttagc

SEQ ID NO: 10110 - DNA, 18 bp, Artificial Sequence
  Synthetic Polynucleotide
ctggtgacatactcaagc

SEQ ID NO: 10111 - DNA, 18 bp, Artificial Sequence
  Synthetic Polynucleotide
ccccaaaagcctcattga

SEQ ID NO: 10112 - DNA, 18 bp, Artificial Sequence
  Synthetic Polynucleotide
catctcggatgtagttcc

SEQ ID NO: 10113 - DNA, 17 bp, Artificial Sequence
  Synthetic Polynucleotide
ctctcatggttgagacc

SEQ ID NO: 10114 - DNA, 17 bp, Artificial Sequence
  Synthetic Polynucleotide
ccctctccccaatcttt

SEQ ID NO: 10115 - DNA, 17 bp, Artificial Sequence
  Synthetic Polynucleotide
gcatcaataccagctta

SEQ ID NO: 10116 - DNA, 17 bp, Artificial Sequence
  Synthetic Polynucleotide
cggtacattctcctcca

SEQ ID NO: 10117 - DNA, 17 bp, Artificial Sequence
  Synthetic Polynucleotide
acatacggacgatcaag

SEQ ID NO: 10118 - DNA, 17 bp, Artificial Sequence
  Synthetic Polynucleotide
gtgattgcctcaagcct

SEQ ID NO: 10119 - DNA, 18 bp, Artificial Sequence
  Synthetic Polynucleotide
gttcacgatcaagacaga

SEQ ID NO: 10120 - DNA, 18 bp, Artificial Sequence
  Synthetic Polynucleotide
tgatccctaagctcccta

SEQ ID NO: 10121 - DNA, 17 bp, Artificial Sequence
  Synthetic Polynucleotide
tgagagaaaggtcctgg

SEQ ID NO: 10122 - DNA, 17 bp, Artificial Sequence
  Synthetic Polynucleotide
tacctgatgttctttgc

SEQ ID NO: 10123 - DNA, 18 bp, Artificial Sequence
  Synthetic Polynucleotide
gaaacagcaaggaaacag

SEQ ID NO: 10124 - DNA, 17 bp, Artificial Sequence
  Synthetic Polynucleotide
tattgcagcttcaacag

SEQ ID NO: 10125 - DNA, 18 bp, Artificial Sequence
  Synthetic Polynucleotide
tgtctgtacttcccaaaa

SEQ ID NO: 10126 - DNA, 17 bp, Artificial Sequence
  Synthetic Polynucleotide
atttcatgtgcagctct

SEQ ID NO: 10127 - DNA, 18 bp, Artificial Sequence
  Synthetic Polynucleotide
gcaagtgacccttattct

SEQ ID NO: 10128 - DNA, 18 bp, Artificial Sequence
  Synthetic Polynucleotide
taaagacaacactgcttt

SEQ ID NO: 10129 - DNA, 17 bp, Artificial Sequence
  Synthetic Polynucleotide
atccagcttccatcaaa

SEQ ID NO: 10130 - DNA, 18 bp, Artificial Sequence
  Synthetic Polynucleotide
tttggtgagtcctgtagt

SEQ ID NO: 10131 - DNA, 17 bp, Artificial Sequence
  Synthetic Polynucleotide
gcatcctcaaatctggc

SEQ ID NO: 10132 - DNA, 17 bp, Artificial Sequence
  Synthetic Polynucleotide
tcgcttcaatagtccac

SEQ ID NO: 10133 - DNA, 17 bp, Artificial Sequence
  Synthetic Polynucleotide
catgctccaccttacat

SEQ ID NO: 10134 - DNA, 18 bp, Artificial Sequence
  Synthetic Polynucleotide
accaactacccttctttg

SEQ ID NO: 10135 - DNA, 18 bp, Artificial Sequence
  Synthetic Polynucleotide
aattaccactcgatccag

SEQ ID NO: 10136 - DNA, 18 bp, Artificial Sequence
  Synthetic Polynucleotide
tgctagtccccagaaatt

SEQ ID NO: 10137 - DNA, 17 bp, Artificial Sequence
  Synthetic Polynucleotide
cgttcccatcaactgta

SEQ ID NO: 10138 - DNA, 18 bp, Artificial Sequence
  Synthetic Polynucleotide
tgcatcttcccaactgcc

SEQ ID NO: 10139 - DNA, 18 bp, Artificial Sequence
  Synthetic Polynucleotide
ctcccgaatatgcccaag

SEQ ID NO: 10140 - DNA, 18 bp, Artificial Sequence
  Synthetic Polynucleotide
atcaaatcctagcctccc

SEQ ID NO: 10141 - DNA, 18 bp, Artificial Sequence
  Synthetic Polynucleotide
caacactgaatccacgat

SEQ ID NO: 10142 - DNA, 17 bp, Artificial Sequence
  Synthetic Polynucleotide
tcatcaagcctttgtgc

SEQ ID NO: 10143 - DNA, 18 bp, Artificial Sequence
  Synthetic Polynucleotide
accatctgacaacaactt

SEQ ID NO: 10144 - DNA, 17 bp, Artificial Sequence
  Synthetic Polynucleotide
tcaataccacccatagg

SEQ ID NO: 10145 - DNA, 18 bp, Artificial Sequence
  Synthetic Polynucleotide
gacaagaaaccacaaaca

SEQ ID NO: 10146 - DNA, 18 bp, Artificial Sequence
  Synthetic Polynucleotide
cttcagcggtcccatcat

SEQ ID NO: 10147 - DNA, 17 bp, Artificial Sequence
  Synthetic Polynucleotide
gatgagactcgatctgc

SEQ ID NO: 10148 - DNA, 17 bp, Artificial Sequence
  Synthetic Polynucleotide
ggaccccacatatccac

SEQ ID NO: 10149 - DNA, 18 bp, Artificial Sequence
  Synthetic Polynucleotide
tcgcccttaaagagattt

SEQ ID NO: 10150 - DNA, 17 bp, Artificial Sequence
  Synthetic Polynucleotide
ggtgaagacacccttca

SEQ ID NO: 10151 - DNA, 17 bp, Artificial Sequence
  Synthetic Polynucleotide
caaatgcagctacaacg

SEQ ID NO: 10152 - DNA, 18 bp, Artificial Sequence
  Synthetic Polynucleotide
acctcttcgaatttgtca

SEQ ID NO: 10153 - DNA, 17 bp, Artificial Sequence
  Synthetic Polynucleotide
atcctttggtcatcccg

SEQ ID NO: 10154 - DNA, 18 bp, Artificial Sequence
  Synthetic Polynucleotide
cttcctcctcttccaatg

SEQ ID NO: 10155 - DNA, 18 bp, Artificial Sequence
  Synthetic Polynucleotide
caaagctaaagtccctca

SEQ ID NO: 10156 - DNA, 18 bp, Artificial Sequence
  Synthetic Polynucleotide
taaccccattttctttgg

SEQ ID NO: 10157 - DNA, 18 bp, Artificial Sequence
  Synthetic Polynucleotide
tctcctgatcacacccaa

SEQ ID NO: 10158 - DNA, 18 bp, Artificial Sequence
  Synthetic Polynucleotide
ccacagcatcattgacaa

SEQ ID NO: 10159 - DNA, 18 bp, Artificial Sequence
  Synthetic Polynucleotide
attcactccagcaagctc

SEQ ID NO: 10160 - DNA, 18 bp, Artificial Sequence
  Synthetic Polynucleotide
agcccaagagtacactgt

SEQ ID NO: 10161 - DNA, 18 bp, Artificial Sequence
  Synthetic Polynucleotide
gactgaccccacgaatca

SEQ ID NO: 10162 - DNA, 18 bp, Artificial Sequence
  Synthetic Polynucleotide
tgccctgccccataagct

SEQ ID NO: 10163 - DNA, 17 bp, Artificial Sequence
  Synthetic Polynucleotide
tggtgccctcattttca

SEQ ID NO: 10164 - DNA, 17 bp, Artificial Sequence
  Synthetic Polynucleotide
tatcccacttcctacac

SEQ ID NO: 10165 - DNA, 18 bp, Artificial Sequence
  Synthetic Polynucleotide
cctgatttaaacccggta

SEQ ID NO: 10166 - DNA, 18 bp, Artificial Sequence
  Synthetic Polynucleotide
gcttgaaccactcattcg

SEQ ID NO: 10167 - DNA, 17 bp, Artificial Sequence
  Synthetic Polynucleotide
gcgcttgtataccgagt

SEQ ID NO: 10168 - DNA, 18 bp, Artificial Sequence
  Synthetic Polynucleotide
agcagctcccgttgtgaa

SEQ ID NO: 10169 - DNA, 17 bp, Artificial Sequence
  Synthetic Polynucleotide
tatcgggcagtttggtg

SEQ ID NO: 10170 - DNA, 17 bp, Artificial Sequence
  Synthetic Polynucleotide
gcatctggaacaacaaa

SEQ ID NO: 10171 - DNA, 17 bp, Artificial Sequence
  Synthetic Polynucleotide
ttctgtacgctccaagt

SEQ ID NO: 10172 - DNA, 17 bp, Artificial Sequence
  Synthetic Polynucleotide
aagatgtgagcagggcg

SEQ ID NO: 10173 - DNA, 17 bp, Artificial Sequence
  Synthetic Polynucleotide
ccgaatcactcactggt

SEQ ID NO: 10174 - DNA, 18 bp, Artificial Sequence
  Synthetic Polynucleotide
aacattcttccatcaggc

SEQ ID NO: 10175 - DNA, 17 bp, Artificial Sequence
  Synthetic Polynucleotide
accgcttgattggcatg

SEQ ID NO: 10176 - DNA, 17 bp, Artificial Sequence
  Synthetic Polynucleotide
caagtgaaggtagggta

SEQ ID NO: 10177 - DNA, 18 bp, Artificial Sequence
  Synthetic Polynucleotide
ggaccactagtccccttc

SEQ ID NO: 10178 - DNA, 17 bp, Artificial Sequence
  Synthetic Polynucleotide
acagagtcgaggacgaa

SEQ ID NO: 10179 - DNA, 18 bp, Artificial Sequence
  Synthetic Polynucleotide
ttcgacattctgaacgct

SEQ ID NO: 10180 - DNA, 18 bp, Artificial Sequence
  Synthetic Polynucleotide
gaaggtaggcatttggca

SEQ ID NO: 10181 - DNA, 17 bp, Artificial Sequence
  Synthetic Polynucleotide
ctcgaaccttttcaacc

SEQ ID NO: 10182 - DNA, 18 bp, Artificial Sequence
  Synthetic Polynucleotide
ccttgaggtagtcccatg

SEQ ID NO: 10183 - DNA, 18 bp, Artificial Sequence
  Synthetic Polynucleotide
tacttttggcacagttta

SEQ ID NO: 10184 - DNA, 18 bp, Artificial Sequence
  Synthetic Polynucleotide
cggtgtcttcatcagcat

SEQ ID NO: 10185 - DNA, 17 bp, Artificial Sequence
  Synthetic Polynucleotide
actagaccatcattggc

SEQ ID NO: 10186 - DNA, 18 bp, Artificial Sequence
  Synthetic Polynucleotide
gtttctgtattacggcac

SEQ ID NO: 10187 - DNA, 18 bp, Artificial Sequence
  Synthetic Polynucleotide
tgtcattggcacggcatg

SEQ ID NO: 10188 - DNA, 18 bp, Artificial Sequence
  Synthetic Polynucleotide
tgtcttgtaccatttcga

SEQ ID NO: 10189 - DNA, 17 bp, Artificial Sequence
  Synthetic Polynucleotide
cgacgaacacacgctct

SEQ ID NO: 10190 - DNA, 18 bp, Artificial Sequence
  Synthetic Polynucleotide
cggaggaatcattcagca

SEQ ID NO: 10191 - DNA, 18 bp, Artificial Sequence
  Synthetic Polynucleotide
ctttccgctactctcctc

SEQ ID NO: 10192 - DNA, 17 bp, Artificial Sequence
  Synthetic Polynucleotide
cgatctccatccatcgt

SEQ ID NO: 10193 - DNA, 18 bp, Artificial Sequence
  Synthetic Polynucleotide
gtgaagtatctctccctg

SEQ ID NO: 10194 - DNA, 18 bp, Artificial Sequence
  Synthetic Polynucleotide
ggttgaccgctttctcgt

SEQ ID NO: 10195 - DNA, 18 bp, Artificial Sequence
  Synthetic Polynucleotide
gaataggcatttctgcaa

SEQ ID NO: 10196 - DNA, 18 bp, Artificial Sequence
  Synthetic Polynucleotide
aaagagtccgtttgaaga

SEQ ID NO: 10197 - DNA, 17 bp, Artificial Sequence
  Synthetic Polynucleotide
cctacatccccaacttc

SEQ ID NO: 10198 - DNA, 17 bp, Artificial Sequence
  Synthetic Polynucleotide
aggcatatatccatgcg

SEQ ID NO: 10199 - DNA, 18 bp, Artificial Sequence
  Synthetic Polynucleotide
cgaaaaccgcttcttagt

SEQ ID NO: 10200 - DNA, 18 bp, Artificial Sequence
  Synthetic Polynucleotide
aacatcgtaggtcgtttc

SEQ ID NO: 10201 - DNA, 17 bp, Artificial Sequence
  Synthetic Polynucleotide
aaattgatccccgcatc

SEQ ID NO: 10202 - DNA, 18 bp, Artificial Sequence
  Synthetic Polynucleotide
gggttgtcattagcatcg

SEQ ID NO: 10203 - DNA, 18 bp, Artificial Sequence
  Synthetic Polynucleotide
tatagacccatctctcgt

SEQ ID NO: 10204 - DNA, 17 bp, Artificial Sequence
  Synthetic Polynucleotide
tctaggcacagcacaaa

SEQ ID NO: 10205 - DNA, 18 bp, Artificial Sequence
  Synthetic Polynucleotide
tcatcgaattttcccagc

SEQ ID NO: 10206 - DNA, 17 bp, Artificial Sequence
  Synthetic Polynucleotide
caaattggcagttgtgg

SEQ ID NO: 10207 - DNA, 17 bp, Artificial Sequence
  Synthetic Polynucleotide
cgcatccgcagtctgtg

SEQ ID NO: 10208 - DNA, 18 bp, Artificial Sequence
  Synthetic Polynucleotide
gtgtctgaggcttgaaaa

SEQ ID NO: 10209 - DNA, 17 bp, Artificial Sequence
  Synthetic Polynucleotide
aaggctttccccacgaa

SEQ ID NO: 10210 - DNA, 18 bp, Artificial Sequence
  Synthetic Polynucleotide
cgcattccaagagaaata

SEQ ID NO: 10211 - DNA, 17 bp, Artificial Sequence
  Synthetic Polynucleotide
tcctggaacaaaacgtt

SEQ ID NO: 10212 - DNA, 18 bp, Artificial Sequence
  Synthetic Polynucleotide
agagtacgcttccatagg

SEQ ID NO: 10213 - DNA, 18 bp, Artificial Sequence
  Synthetic Polynucleotide
cgaagtttctccaacttt

SEQ ID NO: 10214 - DNA, 18 bp, Artificial Sequence
  Synthetic Polynucleotide
ccagtcgcagcactcctg

SEQ ID NO: 10215 - DNA, 18 bp, Artificial Sequence
  Synthetic Polynucleotide
cgacgctcccagtttctt

SEQ ID NO: 10216 - DNA, 18 bp, Artificial Sequence
  Synthetic Polynucleotide
ggcatcttctaataccgt

SEQ ID NO: 10217 - DNA, 18 bp, Artificial Sequence
  Synthetic Polynucleotide
ctcaacagctagtccatg

SEQ ID NO: 10218 - DNA, 17 bp, Artificial Sequence
  Synthetic Polynucleotide
ctctccatcatcatccc

SEQ ID NO: 10219 - DNA, 18 bp, Artificial Sequence
  Synthetic Polynucleotide
aggctccttgtcaatatt

SEQ ID NO: 10220 - DNA, 18 bp, Artificial Sequence
  Synthetic Polynucleotide
tcacccataggtagaccc

SEQ ID NO: 10221 - DNA, 17 bp, Artificial Sequence
  Synthetic Polynucleotide
ggtctgtctgaggctac

SEQ ID NO: 10222 - DNA, 18 bp, Artificial Sequence
  Synthetic Polynucleotide
caacagtctcttttacga

SEQ ID NO: 10223 - DNA, 17 bp, Artificial Sequence
  Synthetic Polynucleotide
ctcacgcagcaaaatca

SEQ ID NO: 10224 - DNA, 18 bp, Artificial Sequence
  Synthetic Polynucleotide
gagcagcactcctaacac

SEQ ID NO: 10225 - DNA, 18 bp, Artificial Sequence
  Synthetic Polynucleotide
aagtcagtttctgtttcg

SEQ ID NO: 10226 - DNA, 17 bp, Artificial Sequence
  Synthetic Polynucleotide
gttggttctccttggtc

SEQ ID NO: 10227 - DNA, 18 bp, Artificial Sequence
  Synthetic Polynucleotide
tgtgcttggttggtaaag

SEQ ID NO: 10228 - DNA, 17 bp, Artificial Sequence
  Synthetic Polynucleotide
ttccacccaatcctggt

SEQ ID NO: 10229 - DNA, 18 bp, Artificial Sequence
  Synthetic Polynucleotide
ctagccgttggtcacgcc

SEQ ID NO: 10230 - DNA, 18 bp, Artificial Sequence
  Synthetic Polynucleotide
ccccagttgttgttgatg

SEQ ID NO: 10231 - DNA, 17 bp, Artificial Sequence
  Synthetic Polynucleotide
attggcattgcgattcc

SEQ ID NO: 10232 - DNA, 17 bp, Artificial Sequence
  Synthetic Polynucleotide
tttgcatctgtagctgt

SEQ ID NO: 10233 - DNA, 18 bp, Artificial Sequence
  Synthetic Polynucleotide
caaagagtatcagcaagg

SEQ ID NO: 10234 - DNA, 18 bp, Artificial Sequence
  Synthetic Polynucleotide
agaaggtcaaaggtcagt

SEQ ID NO: 10235 - DNA, 18 bp, Artificial Sequence
  Synthetic Polynucleotide
actgccgtcgtcgtcgtc

SEQ ID NO: 10236 - DNA, 18 bp, Artificial Sequence
  Synthetic Polynucleotide
ttgccccgattcaaatat

SEQ ID NO: 10237 - DNA, 17 bp, Artificial Sequence
  Synthetic Polynucleotide
ggctcccgccagatttt

SEQ ID NO: 10238 - DNA, 18 bp, Artificial Sequence
  Synthetic Polynucleotide
gccttattcttccttgga

SEQ ID NO: 10239 - DNA, 17 bp, Artificial Sequence
  Synthetic Polynucleotide
aactcctatcgaacgag

SEQ ID NO: 10240 - DNA, 18 bp, Artificial Sequence
  Synthetic Polynucleotide
tctcaggtctgcctctat

SEQ ID NO: 10241 - DNA, 18 bp, Artificial Sequence
  Synthetic Polynucleotide
tatgtgcatggttagtta

SEQ ID NO: 10242 - DNA, 18 bp, Artificial Sequence
  Synthetic Polynucleotide
agcatccaccattctttg

SEQ ID NO: 10243 - DNA, 17 bp, Artificial Sequence
  Synthetic Polynucleotide
actttggagactgcgaa

SEQ ID NO: 10244 - DNA, 18 bp, Artificial Sequence
  Synthetic Polynucleotide
gcataccactgtcgtgtg

SEQ ID NO: 10245 - DNA, 18 bp, Artificial Sequence
  Synthetic Polynucleotide
ccggaaacagtagacaag

SEQ ID NO: 10246 - DNA, 17 bp, Artificial Sequence
  Synthetic Polynucleotide
caccagatcaccatctt

SEQ ID NO: 10247 - DNA, 18 bp, Artificial Sequence
  Synthetic Polynucleotide
gaaccccaattctgacgc

SEQ ID NO: 10248 - DNA, 18 bp, Artificial Sequence
  Synthetic Polynucleotide
ctgcatcatcatccagtc

SEQ ID NO: 10249 - DNA, 18 bp, Artificial Sequence
  Synthetic Polynucleotide
caaagaacatagctccta

SEQ ID NO: 10250 - DNA, 18 bp, Artificial Sequence
  Synthetic Polynucleotide
ctgtgaatgagcgaacat

SEQ ID NO: 10251 - DNA, 17 bp, Artificial Sequence
  Synthetic Polynucleotide
aattggcattgcgattc

SEQ ID NO: 10252 - DNA, 17 bp, Artificial Sequence
  Synthetic Polynucleotide
caagcctcatgtcggta

SEQ ID NO: 10253 - DNA, 17 bp, Artificial Sequence
  Synthetic Polynucleotide
tcacccacaaatgtcaa

SEQ ID NO: 10254 - DNA, 17 bp, Artificial Sequence
  Synthetic Polynucleotide
tcccttccagttcattt

SEQ ID NO: 10255 - DNA, 18 bp, Artificial Sequence
  Synthetic Polynucleotide
atactacccagatttcga

SEQ ID NO: 10256 - DNA, 18 bp, Artificial Sequence
  Synthetic Polynucleotide
gtttcttggatttcccac

SEQ ID NO: 10257 - DNA, 18 bp, Artificial Sequence
  Synthetic Polynucleotide
ggtgagtacaaaatgagc

SEQ ID NO: 10258 - DNA, 17 bp, Artificial Sequence
  Synthetic Polynucleotide
gcatttacccctcgtat

SEQ ID NO: 10259 - DNA, 17 bp, Artificial Sequence
  Synthetic Polynucleotide
attatctgccgtaccgt

SEQ ID NO: 10260 - DNA, 17 bp, Artificial Sequence
  Synthetic Polynucleotide
cgagtttggtccagtag

SEQ ID NO: 10261 - DNA, 18 bp, Artificial Sequence
  Synthetic Polynucleotide
tatttggttctatggacc

SEQ ID NO: 10262 - DNA, 17 bp, Artificial Sequence
  Synthetic Polynucleotide
ccaccctagcctatcgg

SEQ ID NO: 10263 - DNA, 17 bp, Artificial Sequence
  Synthetic Polynucleotide
atccccgtgtgtcccct

SEQ ID NO: 10264 - DNA, 18 bp, Artificial Sequence
  Synthetic Polynucleotide
ccactagttgtttgcctg

SEQ ID NO: 10265 - DNA, 18 bp, Artificial Sequence
  Synthetic Polynucleotide
ggtgcaagtagattacca

SEQ ID NO: 10266 - DNA, 18 bp, Artificial Sequence
  Synthetic Polynucleotide
accagagtcattagcaag

SEQ ID NO: 10267 - DNA, 17 bp, Artificial Sequence
  Synthetic Polynucleotide
accaccccgtatattgc

SEQ ID NO: 10268 - DNA, 18 bp, Artificial Sequence
  Synthetic Polynucleotide
gccttgtagcccaatctg

SEQ ID NO: 10269 - DNA, 17 bp, Artificial Sequence
  Synthetic Polynucleotide
caaaagccttgtgtgca

SEQ ID NO: 10270 - DNA, 18 bp, Artificial Sequence
  Synthetic Polynucleotide
attcctagcccattctgc

SEQ ID NO: 10271 - DNA, 17 bp, Artificial Sequence
  Synthetic Polynucleotide
cgccagtaataagcgaa

SEQ ID NO: 10272 - DNA, 18 bp, Artificial Sequence
  Synthetic Polynucleotide
gagtgcatcactacgcct

SEQ ID NO: 10273 - DNA, 17 bp, Artificial Sequence
  Synthetic Polynucleotide
tactgcctcccactaca

SEQ ID NO: 10274 - DNA, 18 bp, Artificial Sequence
  Synthetic Polynucleotide
accagcatctaaacgaaa

SEQ ID NO: 10275 - DNA, 18 bp, Artificial Sequence
  Synthetic Polynucleotide
gctaaagcgataattgcg

SEQ ID NO: 10276 - DNA, 18 bp, Artificial Sequence
  Synthetic Polynucleotide
gtcttccttgtagtcccc

SEQ ID NO: 10277 - DNA, 17 bp, Artificial Sequence
  Synthetic Polynucleotide
cagagtcaaagcctaga

SEQ ID NO: 10278 - DNA, 18 bp, Artificial Sequence
  Synthetic Polynucleotide
atcatcgagagcatcagg

SEQ ID NO: 10279 - DNA, 17 bp, Artificial Sequence
  Synthetic Polynucleotide
tgcgattccattgatct

SEQ ID NO: 10280 - DNA, 17 bp, Artificial Sequence
  Synthetic Polynucleotide
ataccgcctagataacg

SEQ ID NO: 10281 - DNA, 17 bp, Artificial Sequence
  Synthetic Polynucleotide
attcaccccaatcagga

SEQ ID NO: 10282 - DNA, 17 bp, Artificial Sequence
  Synthetic Polynucleotide
ttcaaccaccccaccaa

SEQ ID NO: 10283 - DNA, 17 bp, Artificial Sequence
  Synthetic Polynucleotide
tgaagtaagagcccttg

SEQ ID NO: 10284 - DNA, 17 bp, Artificial Sequence
  Synthetic Polynucleotide
cgacacagatgaagtcg

SEQ ID NO: 10285 - DNA, 17 bp, Artificial Sequence
  Synthetic Polynucleotide
caccaccaccaccgcca

SEQ ID NO: 10286 - DNA, 18 bp, Artificial Sequence
  Synthetic Polynucleotide
aacgtttacgctgaaacc

SEQ ID NO: 10287 - DNA, 17 bp, Artificial Sequence
  Synthetic Polynucleotide
gcgtatcaagtcaatgc

SEQ ID NO: 10288 - DNA, 18 bp, Artificial Sequence
  Synthetic Polynucleotide
ccaaagtagtcggttccg

SEQ ID NO: 10289 - DNA, 17 bp, Artificial Sequence
  Synthetic Polynucleotide
tccggcccctgaatgcg

SEQ ID NO: 10290 - DNA, 18 bp, Artificial Sequence
  Synthetic Polynucleotide
cgcaggtaaagtgatctg

SEQ ID NO: 10291 - DNA, 17 bp, Artificial Sequence
  Synthetic Polynucleotide
atcctctcctttgcacg

SEQ ID NO: 10292 - DNA, 17 bp, Artificial Sequence
  Synthetic Polynucleotide
aaaacctaaatgcccct

SEQ ID NO: 10293 - DNA, 18 bp, Artificial Sequence
  Synthetic Polynucleotide
ggctacgggtgaaacctc

SEQ ID NO: 10294 - DNA, 18 bp, Artificial Sequence
  Synthetic Polynucleotide
gagcatgtcctgtccttt

SEQ ID NO: 10295 - DNA, 17 bp, Artificial Sequence
  Synthetic Polynucleotide
cctgtcgctttgaaagt

SEQ ID NO: 10296 - DNA, 17 bp, Artificial Sequence
  Synthetic Polynucleotide
ggtcgctacagacgttg

SEQ ID NO: 10297 - DNA, 18 bp, Artificial Sequence
  Synthetic Polynucleotide
tgaaggctacgatagtgc

SEQ ID NO: 10298 - DNA, 18 bp, Artificial Sequence
  Synthetic Polynucleotide
aggaattggtcgagttgg

SEQ ID NO: 10299 - DNA, 17 bp, Artificial Sequence
  Synthetic Polynucleotide
atcagccccatccaata

SEQ ID NO: 10300 - DNA, 17 bp, Artificial Sequence
  Synthetic Polynucleotide
tcacagcagtagatggt

SEQ ID NO: 10301 - DNA, 18 bp, Artificial Sequence
  Synthetic Polynucleotide
gaggcggtcctctctggc

SEQ ID NO: 10302 - DNA, 17 bp, Artificial Sequence
  Synthetic Polynucleotide
ctttgtgtggtcgctac

SEQ ID NO: 10303 - DNA, 18 bp, Artificial Sequence
  Synthetic Polynucleotide
ccaggctaagagaagtag

SEQ ID NO: 10304 - DNA, 17 bp, Artificial Sequence
  Synthetic Polynucleotide
cctgttaccaggtgttg

SEQ ID NO: 10305 - DNA, 18 bp, Artificial Sequence
  Synthetic Polynucleotide
gagagtccctttcccagc

SEQ ID NO: 10306 - DNA, 18 bp, Artificial Sequence
  Synthetic Polynucleotide
tgggtgttgtacatggca

SEQ ID NO: 10307 - DNA, 17 bp, Artificial Sequence
  Synthetic Polynucleotide
tcctccgagaaaaccca

SEQ ID NO: 10308 - DNA, 18 bp, Artificial Sequence
  Synthetic Polynucleotide
gctacccttaatctctcg

SEQ ID NO: 10309 - DNA, 17 bp, Artificial Sequence
  Synthetic Polynucleotide
ccttgccccttgacgca

SEQ ID NO: 10310 - DNA, 17 bp, Artificial Sequence
  Synthetic Polynucleotide
agaggctagtgttacca

SEQ ID NO: 10311 - DNA, 17 bp, Artificial Sequence
  Synthetic Polynucleotide
gtcccactcttcacagg

SEQ ID NO: 10312 - DNA, 17 bp, Artificial Sequence
  Synthetic Polynucleotide
tgctcgtgttaactagg

SEQ ID NO: 10313 - DNA, 18 bp, Artificial Sequence
  Synthetic Polynucleotide
ttcggtttgcatcttttg

SEQ ID NO: 10314 - DNA, 17 bp, Artificial Sequence
  Synthetic Polynucleotide
gaaacccttaaaaggcc

SEQ ID NO: 10315 - DNA, 18 bp, Artificial Sequence
  Synthetic Polynucleotide
ccttcttgtaaggcactc

SEQ ID NO: 10316 - DNA, 17 bp, Artificial Sequence
  Synthetic Polynucleotide
ttgcaggcttgagaaac

SEQ ID NO: 10317 - DNA, 18 bp, Artificial Sequence
  Synthetic Polynucleotide
tgatgtgttggtcgtttg

SEQ ID NO: 10318 - DNA, 17 bp, Artificial Sequence
  Synthetic Polynucleotide
acccaaagtagtcggtc

SEQ ID NO: 10319 - DNA, 18 bp, Artificial Sequence
  Synthetic Polynucleotide
gtgcttctaagtttcggg

SEQ ID NO: 10320 - DNA, 17 bp, Artificial Sequence
  Synthetic Polynucleotide
cctgttttcccctccct

SEQ ID NO: 10321 - DNA, 17 bp, Artificial Sequence
  Synthetic Polynucleotide
ccggatcatcaagttgg

SEQ ID NO: 10322 - DNA, 17 bp, Artificial Sequence
  Synthetic Polynucleotide
catgagtccattcgttg

SEQ ID NO: 10323 - DNA, 17 bp, Artificial Sequence
  Synthetic Polynucleotide
gatccagcagtgttctt

SEQ ID NO: 10324 - DNA, 18 bp, Artificial Sequence
  Synthetic Polynucleotide
gcacattccagtgttgct

SEQ ID NO: 10325 - DNA, 17 bp, Artificial Sequence
  Synthetic Polynucleotide
caaagtagttggtccca

SEQ ID NO: 10326 - DNA, 17 bp, Artificial Sequence
  Synthetic Polynucleotide
tgttcccactcactcca

SEQ ID NO: 10327 - DNA, 17 bp, Artificial Sequence
  Synthetic Polynucleotide
agcagatacattccgtc

SEQ ID NO: 10328 - DNA, 18 bp, Artificial Sequence
  Synthetic Polynucleotide
ctggttcgatggttgttc

SEQ ID NO: 10329 - DNA, 17 bp, Artificial Sequence
  Synthetic Polynucleotide
tgcagaattgcagtttg

SEQ ID NO: 10330 - DNA, 18 bp, Artificial Sequence
  Synthetic Polynucleotide
tggccctctctcctccag

SEQ ID NO: 10331 - DNA, 18 bp, Artificial Sequence
  Synthetic Polynucleotide
agcttcatcatcttccac

SEQ ID NO: 10332 - DNA, 18 bp, Artificial Sequence
  Synthetic Polynucleotide
gcaagattttattgcccc

SEQ ID NO: 10333 - DNA, 18 bp, Artificial Sequence
  Synthetic Polynucleotide
tcatcctcaaatcagaca

SEQ ID NO: 10334 - DNA, 18 bp, Artificial Sequence
  Synthetic Polynucleotide
tggattgaatctcccaat

SEQ ID NO: 10335 - DNA, 17 bp, Artificial Sequence
  Synthetic Polynucleotide
ccgagatgttggtgatt

SEQ ID NO: 10336 - DNA, 17 bp, Artificial Sequence
  Synthetic Polynucleotide
ctgtccctcctcttcac

SEQ ID NO: 10337 - DNA, 18 bp, Artificial Sequence
  Synthetic Polynucleotide
gcatcatttccacaggtg

SEQ ID NO: 10338 - DNA, 18 bp, Artificial Sequence
  Synthetic Polynucleotide
catggtagttgtgtaggt

SEQ ID NO: 10339 - DNA, 18 bp, Artificial Sequence
  Synthetic Polynucleotide
ccccttgcttcatacttg

SEQ ID NO: 10340 - DNA, 17 bp, Artificial Sequence
  Synthetic Polynucleotide
cgagttgtgtgttatgc

SEQ ID NO: 10341 - DNA, 18 bp, Artificial Sequence
  Synthetic Polynucleotide
ccgttatctagttcggtt

SEQ ID NO: 10342 - DNA, 17 bp, Artificial Sequence
  Synthetic Polynucleotide
tgcatcatatccttggc

SEQ ID NO: 10343 - DNA, 17 bp, Artificial Sequence
  Synthetic Polynucleotide
gcacattcccctaagta

SEQ ID NO: 10344 - DNA, 17 bp, Artificial Sequence
  Synthetic Polynucleotide
ctaccctcccttccaca

SEQ ID NO: 10345 - DNA, 18 bp, Artificial Sequence
  Synthetic Polynucleotide
ctccagcattgattcatc

SEQ ID NO: 10346 - DNA, 18 bp, Artificial Sequence
  Synthetic Polynucleotide
aatacagtccagtccacc

SEQ ID NO: 10347 - DNA, 17 bp, Artificial Sequence
  Synthetic Polynucleotide
tgtcacggtattgtcgt

SEQ ID NO: 10348 - DNA, 18 bp, Artificial Sequence
  Synthetic Polynucleotide
gcagcttcagttcagaaa

SEQ ID NO: 10349 - DNA, 18 bp, Artificial Sequence
  Synthetic Polynucleotide
gagcccctataatttgca

SEQ ID NO: 10350 - DNA, 17 bp, Artificial Sequence
  Synthetic Polynucleotide
aacagttgaccctcttc

SEQ ID NO: 10351 - DNA, 17 bp, Artificial Sequence
  Synthetic Polynucleotide
gtgtgtgtcagtgatct

SEQ ID NO: 10352 - DNA, 17 bp, Artificial Sequence
  Synthetic Polynucleotide
ccgtacatttcagcagc

SEQ ID NO: 10353 - DNA, 18 bp, Artificial Sequence
  Synthetic Polynucleotide
atttgtcctttgttgacc

SEQ ID NO: 10354 - DNA, 18 bp, Artificial Sequence
  Synthetic Polynucleotide
taattgctatggttcctg

SEQ ID NO: 10355 - DNA, 18 bp, Artificial Sequence
  Synthetic Polynucleotide
gcttcattgatgagtgta

SEQ ID NO: 10356 - DNA, 17 bp, Artificial Sequence
  Synthetic Polynucleotide
gtaaaggtcaaatggcc

SEQ ID NO: 10357 - DNA, 17 bp, Artificial Sequence
  Synthetic Polynucleotide
acgaccagtcttgactc

SEQ ID NO: 10358 - DNA, 18 bp, Artificial Sequence
  Synthetic Polynucleotide
cgagattatccgtaagct

SEQ ID NO: 10359 - DNA, 18 bp, Artificial Sequence
  Synthetic Polynucleotide
ttcgatttcgtctactgc

SEQ ID NO: 10360 - DNA, 18 bp, Artificial Sequence
  Synthetic Polynucleotide
gctcacgtctgctcagtg

SEQ ID NO: 10361 - DNA, 18 bp, Artificial Sequence
  Synthetic Polynucleotide
cgcacctgttcgacaatc

SEQ ID NO: 10362 - DNA, 18 bp, Artificial Sequence
  Synthetic Polynucleotide
tgacggttttcccttcga

SEQ ID NO: 10363 - DNA, 17 bp, Artificial Sequence
  Synthetic Polynucleotide
catcgtgtacgttgttg

SEQ ID NO: 10364 - DNA, 17 bp, Artificial Sequence
  Synthetic Polynucleotide
cagatcgccaactactg

SEQ ID NO: 10365 - DNA, 17 bp, Artificial Sequence
  Synthetic Polynucleotide
ccatagcttcctgcttg

SEQ ID NO: 10366 - DNA, 17 bp, Artificial Sequence
  Synthetic Polynucleotide
cagggttgatttcgagc

SEQ ID NO: 10367 - DNA, 18 bp, Artificial Sequence
  Synthetic Polynucleotide
gtttcttccaacttggtg

SEQ ID NO: 10368 - DNA, 18 bp, Artificial Sequence
  Synthetic Polynucleotide
tgtttgtgttgtagggta

SEQ ID NO: 10369 - DNA, 17 bp, Artificial Sequence
  Synthetic Polynucleotide
atcctgttcaatctgcc

SEQ ID NO: 10370 - DNA, 17 bp, Artificial Sequence
  Synthetic Polynucleotide
gactgaagaaccttgcc

SEQ ID NO: 10371 - DNA, 17 bp, Artificial Sequence
  Synthetic Polynucleotide
gatgtagccattcaggg

SEQ ID NO: 10372 - DNA, 17 bp, Artificial Sequence
  Synthetic Polynucleotide
gtgatgccgagaagtac

SEQ ID NO: 10373 - DNA, 17 bp, Artificial Sequence
  Synthetic Polynucleotide
agcacaattcacccgta

SEQ ID NO: 10374 - DNA, 18 bp, Artificial Sequence
  Synthetic Polynucleotide
tcttgatgctgccgctcg

SEQ ID NO: 10375 - DNA, 18 bp, Artificial Sequence
  Synthetic Polynucleotide
cagctcttgtattacgct

SEQ ID NO: 10376 - DNA, 17 bp, Artificial Sequence
  Synthetic Polynucleotide
atcctttctgacttccg

SEQ ID NO: 10377 - DNA, 18 bp, Artificial Sequence
  Synthetic Polynucleotide
atgtcattgccatagtta

SEQ ID NO: 10378 - DNA, 18 bp, Artificial Sequence
  Synthetic Polynucleotide
gcccttaattagcctctt

SEQ ID NO: 10379 - DNA, 17 bp, Artificial Sequence
  Synthetic Polynucleotide
tagccccaaagtgatag

SEQ ID NO: 10380 - DNA, 17 bp, Artificial Sequence
  Synthetic Polynucleotide
gagatgactctgaacga

SEQ ID NO: 10381 - DNA, 17 bp, Artificial Sequence
  Synthetic Polynucleotide
tttgtttcaccgcccaa

SEQ ID NO: 10382 - DNA, 18 bp, Artificial Sequence
  Synthetic Polynucleotide
tgatgactttccttggaa

SEQ ID NO: 10383 - DNA, 17 bp, Artificial Sequence
  Synthetic Polynucleotide
gaaacttcatgttcgcc

SEQ ID NO: 10384 - DNA, 18 bp, Artificial Sequence
  Synthetic Polynucleotide
cttccgccacaattcgcc

SEQ ID NO: 10385 - DNA, 18 bp, Artificial Sequence
  Synthetic Polynucleotide
cctttaccactgtgtccc

SEQ ID NO: 10386 - DNA, 17 bp, Artificial Sequence
  Synthetic Polynucleotide
tacccgtattatgctcc

SEQ ID NO: 10387 - DNA, 17 bp, Artificial Sequence
  Synthetic Polynucleotide
tgtcttgcccatctgtt

SEQ ID NO: 10388 - DNA, 18 bp, Artificial Sequence
  Synthetic Polynucleotide
aggttaccttgtacctga

SEQ ID NO: 10389 - DNA, 17 bp, Artificial Sequence
  Synthetic Polynucleotide
ttgtagtcgcaccgctc

SEQ ID NO: 10390 - DNA, 18 bp, Artificial Sequence
  Synthetic Polynucleotide
cagaccaccgccaactcg

SEQ ID NO: 10391 - DNA, 18 bp, Artificial Sequence
  Synthetic Polynucleotide
gcctcctaaaagacccgt

SEQ ID NO: 10392 - DNA, 17 bp, Artificial Sequence
  Synthetic Polynucleotide
ccatcctgccaatacat

SEQ ID NO: 10393 - DNA, 17 bp, Artificial Sequence
  Synthetic Polynucleotide
tgacgcactagctcaga

SEQ ID NO: 10394 - DNA, 17 bp, Artificial Sequence
  Synthetic Polynucleotide
gcagtcttgtcctcagt

SEQ ID NO: 10395 - DNA, 18 bp, Artificial Sequence
  Synthetic Polynucleotide
acgttagcctccgagact

SEQ ID NO: 10396 - DNA, 18 bp, Artificial Sequence
  Synthetic Polynucleotide
tgtctccttcgtgttcaa

SEQ ID NO: 10397 - DNA, 18 bp, Artificial Sequence
  Synthetic Polynucleotide
gtaaagccttagcctcta

SEQ ID NO: 10398 - DNA, 17 bp, Artificial Sequence
  Synthetic Polynucleotide
gttagcccctagcttag

SEQ ID NO: 10399 - DNA, 18 bp, Artificial Sequence
  Synthetic Polynucleotide
cgaactccttcaccagct

SEQ ID NO: 10400 - DNA, 17 bp, Artificial Sequence
  Synthetic Polynucleotide
gacctgctcccattcct

SEQ ID NO: 10401 - DNA, 18 bp, Artificial Sequence
  Synthetic Polynucleotide
tatcgtttctcctaaacc

SEQ ID NO: 10402 - DNA, 17 bp, Artificial Sequence
  Synthetic Polynucleotide
accgctgccaccattga

SEQ ID NO: 10403 - DNA, 18 bp, Artificial Sequence
  Synthetic Polynucleotide
tgtctactcctgaccgca

SEQ ID NO: 10404 - DNA, 17 bp, Artificial Sequence
  Synthetic Polynucleotide
tccaccatgccagatac

SEQ ID NO: 10405 - DNA, 17 bp, Artificial Sequence
  Synthetic Polynucleotide
catcctctgcttgctta

SEQ ID NO: 10406 - DNA, 18 bp, Artificial Sequence
  Synthetic Polynucleotide
gcgtgttaaagatctctc

SEQ ID NO: 10407 - DNA, 17 bp, Artificial Sequence
  Synthetic Polynucleotide
tccatgatttcgcctgg

SEQ ID NO: 10408 - DNA, 17 bp, Artificial Sequence
  Synthetic Polynucleotide
acattgccgcccgagtc

SEQ ID NO: 10409 - DNA, 17 bp, Artificial Sequence
  Synthetic Polynucleotide
ctatgacgcccgcccaa

SEQ ID NO: 10410 - DNA, 17 bp, Artificial Sequence
  Synthetic Polynucleotide
ccccatccgcccgctta

SEQ ID NO: 10411 - DNA, 17 bp, Artificial Sequence
  Synthetic Polynucleotide
gccgcccaactctatat

SEQ ID NO: 10412 - DNA, 17 bp, Artificial Sequence
  Synthetic Polynucleotide
cttggtcctcctgttac

SEQ ID NO: 10413 - DNA, 18 bp, Artificial Sequence
  Synthetic Polynucleotide
tcaaaagatgctttcaga

SEQ ID NO: 10414 - DNA, 18 bp, Artificial Sequence
  Synthetic Polynucleotide
aggttatttcccctttgc

SEQ ID NO: 10415 - DNA, 17 bp, Artificial Sequence
  Synthetic Polynucleotide
tttcacacccatcccat

SEQ ID NO: 10416 - DNA, 18 bp, Artificial Sequence
  Synthetic Polynucleotide
acacctgccgcttaacct

SEQ ID NO: 10417 - DNA, 18 bp, Artificial Sequence
  Synthetic Polynucleotide
gactccgattcttaaagc

SEQ ID NO: 10418 - DNA, 18 bp, Artificial Sequence
  Synthetic Polynucleotide
gttgcaatcctagcccgt

SEQ ID NO: 10419 - DNA, 17 bp, Artificial Sequence
  Synthetic Polynucleotide
aaatgccgaccttgaaa

SEQ ID NO: 10420 - DNA, 18 bp, Artificial Sequence
  Synthetic Polynucleotide
attgttacgtctgaaccc

SEQ ID NO: 10421 - DNA, 17 bp, Artificial Sequence
  Synthetic Polynucleotide
gcttcccactcatcgta

SEQ ID NO: 10422 - DNA, 17 bp, Artificial Sequence
  Synthetic Polynucleotide
tagcccctatttctgat

SEQ ID NO: 10423 - DNA, 18 bp, Artificial Sequence
  Synthetic Polynucleotide
agctctgaactctcaata

SEQ ID NO: 10424 - DNA, 18 bp, Artificial Sequence
  Synthetic Polynucleotide
acttgtgatggtgagtgg

SEQ ID NO: 10425 - DNA, 17 bp, Artificial Sequence
  Synthetic Polynucleotide
atggtgaatagtgcctg

SEQ ID NO: 10426 - DNA, 18 bp, Artificial Sequence
  Synthetic Polynucleotide
cgtgtgtgtgtgtgtgtg

SEQ ID NO: 10427 - DNA, 18 bp, Artificial Sequence
  Synthetic Polynucleotide
tgcgacgttaagtaaatg

SEQ ID NO: 10428 - DNA, 18 bp, Artificial Sequence
  Synthetic Polynucleotide
catgctacgagaaggagg

SEQ ID NO: 10429 - DNA, 18 bp, Artificial Sequence
  Synthetic Polynucleotide
gcagggtgtgtatattcc

SEQ ID NO: 10430 - DNA, 18 bp, Artificial Sequence
  Synthetic Polynucleotide
tcaatatgtgggtttccg

SEQ ID NO: 10431 - DNA, 17 bp, Artificial Sequence
  Synthetic Polynucleotide
gggtttcagtagatgca

SEQ ID NO: 10432 - DNA, 18 bp, Artificial Sequence
  Synthetic Polynucleotide
gtgggaatagtctgtaca

SEQ ID NO: 10433 - DNA, 17 bp, Artificial Sequence
  Synthetic Polynucleotide
cggcggtgaagacgagc

SEQ ID NO: 10434 - DNA, 17 bp, Artificial Sequence
  Synthetic Polynucleotide
ggtggcgggtgtggcag

SEQ ID NO: 10435 - DNA, 18 bp, Artificial Sequence
  Synthetic Polynucleotide
ttgtgcgaatgaagtgtc

SEQ ID NO: 10436 - DNA, 18 bp, Artificial Sequence
  Synthetic Polynucleotide
acgggtgggtttatatcg

SEQ ID NO: 10437 - DNA, 18 bp, Artificial Sequence
  Synthetic Polynucleotide
gtgaacggatctatggag

SEQ ID NO: 10438 - DNA, 18 bp, Artificial Sequence
  Synthetic Polynucleotide
cggggttgaagaaaagag

SEQ ID NO: 10439 - DNA, 18 bp, Artificial Sequence
  Synthetic Polynucleotide
taacgagggtaatttcta

SEQ ID NO: 10440 - DNA, 17 bp, Artificial Sequence
  Synthetic Polynucleotide
cgacaggtggtgataat

SEQ ID NO: 10441 - DNA, 17 bp, Artificial Sequence
  Synthetic Polynucleotide
gtttgctgtgcgaatgg

SEQ ID NO: 10442 - DNA, 18 bp, Artificial Sequence
  Synthetic Polynucleotide
ctctggatgctgtggagc

SEQ ID NO: 10443 - DNA, 18 bp, Artificial Sequence
  Synthetic Polynucleotide
tttgacgttagtgtttga

SEQ ID NO: 10444 - DNA, 18 bp, Artificial Sequence
  Synthetic Polynucleotide
tcaatcaattacaacggc

SEQ ID NO: 10445 - DNA, 18 bp, Artificial Sequence
  Synthetic Polynucleotide
ctgcgtggaaggtgtata

SEQ ID NO: 10446 - DNA, 17 bp, Artificial Sequence
  Synthetic Polynucleotide
aagctgtgtgaaagagc

SEQ ID NO: 10447 - DNA, 18 bp, Artificial Sequence
  Synthetic Polynucleotide
gatgcggtgactctatcg

SEQ ID NO: 10448 - DNA, 18 bp, Artificial Sequence
  Synthetic Polynucleotide
tccaacagggtgtactga

SEQ ID NO: 10449 - DNA, 17 bp, Artificial Sequence
  Synthetic Polynucleotide
ttgctggaatcctctgc

SEQ ID NO: 10450 - DNA, 18 bp, Artificial Sequence
  Synthetic Polynucleotide
agaataatagggcgatcc

SEQ ID NO: 10451 - DNA, 18 bp, Artificial Sequence
  Synthetic Polynucleotide
acgagatggcgagaacgt

SEQ ID NO: 10452 - DNA, 18 bp, Artificial Sequence
  Synthetic Polynucleotide
tggtttgtgtatggtggc

SEQ ID NO: 10453 - DNA, 17 bp, Artificial Sequence
  Synthetic Polynucleotide
agaagtgtggcgggtgt

SEQ ID NO: 10454 - DNA, 17 bp, Artificial Sequence
  Synthetic Polynucleotide
cgagtgacagtgtgtgg

SEQ ID NO: 10455 - DNA, 18 bp, Artificial Sequence
  Synthetic Polynucleotide
gatgcggacgtttgaaat

SEQ ID NO: 10456 - DNA, 18 bp, Artificial Sequence
  Synthetic Polynucleotide
ccatgtacgaatgatacg

SEQ ID NO: 10457 - DNA, 18 bp, Artificial Sequence
  Synthetic Polynucleotide
acatgaagtgggtgtctg

SEQ ID NO: 10458 - DNA, 17 bp, Artificial Sequence
  Synthetic Polynucleotide
cgatgttcgggtctgtc

SEQ ID NO: 10459 - DNA, 18 bp, Artificial Sequence
  Synthetic Polynucleotide
attgttatgctaggctgg

SEQ ID NO: 10460 - DNA, 18 bp, Artificial Sequence
  Synthetic Polynucleotide
cgtgtgtggcgggtgtga

SEQ ID NO: 10461 - DNA, 17 bp, Artificial Sequence
  Synthetic Polynucleotide
cagcgagtatgttagga

SEQ ID NO: 10462 - DNA, 18 bp, Artificial Sequence
  Synthetic Polynucleotide
agctgactttaagaagga

SEQ ID NO: 10463 - DNA, 17 bp, Artificial Sequence
  Synthetic Polynucleotide
ctgtgaggtgtttgggg

SEQ ID NO: 10464 - DNA, 18 bp, Artificial Sequence
  Synthetic Polynucleotide
cacatgtttgtttgggtt

SEQ ID NO: 10465 - DNA, 18 bp, Artificial Sequence
  Synthetic Polynucleotide
cgagtccatttgaatgtt

SEQ ID NO: 10466 - DNA, 18 bp, Artificial Sequence
  Synthetic Polynucleotide
aaactagaagcggtagaa

SEQ ID NO: 10467 - DNA, 17 bp, Artificial Sequence
  Synthetic Polynucleotide
gcaatatcgggtcttga

SEQ ID NO: 10468 - DNA, 18 bp, Artificial Sequence
  Synthetic Polynucleotide
ttgtccattaagtctgga

SEQ ID NO: 10469 - DNA, 17 bp, Artificial Sequence
  Synthetic Polynucleotide
ctggttgtagaacagga

SEQ ID NO: 10470 - DNA, 17 bp, Artificial Sequence
  Synthetic Polynucleotide
agcgatggcgagctgaa

SEQ ID NO: 10471 - DNA, 17 bp, Artificial Sequence
  Synthetic Polynucleotide
gggcaagtgtatgagtg

SEQ ID NO: 10472 - DNA, 18 bp, Artificial Sequence
  Synthetic Polynucleotide
cgagtgtggcggctatgg

SEQ ID NO: 10473 - DNA, 17 bp, Artificial Sequence
  Synthetic Polynucleotide
tctgatgatcctacggc

SEQ ID NO: 10474 - DNA, 18 bp, Artificial Sequence
  Synthetic Polynucleotide
ctacggagattatgttgc

SEQ ID NO: 10475 - DNA, 18 bp, Artificial Sequence
  Synthetic Polynucleotide
cagtgtggcgggtgtgac

SEQ ID NO: 10476 - DNA, 17 bp, Artificial Sequence
  Synthetic Polynucleotide
cgtggctgtggtatatt

SEQ ID NO: 10477 - DNA, 17 bp, Artificial Sequence
  Synthetic Polynucleotide
atgtagggcgagctaat

SEQ ID NO: 10478 - DNA, 18 bp, Artificial Sequence
  Synthetic Polynucleotide
gtgaaatgtggaagatga

SEQ ID NO: 10479 - DNA, 18 bp, Artificial Sequence
  Synthetic Polynucleotide
tgatgtggcgggtttggc

SEQ ID NO: 10480 - DNA, 17 bp, Artificial Sequence
  Synthetic Polynucleotide
caaaatgtggatgtggc

SEQ ID NO: 10481 - DNA, 18 bp, Artificial Sequence
  Synthetic Polynucleotide
tcatatagaaggtgctga

SEQ ID NO: 10482 - DNA, 17 bp, Artificial Sequence
  Synthetic Polynucleotide
ggagaactctgaaggtg

SEQ ID NO: 10483 - DNA, 17 bp, Artificial Sequence
  Synthetic Polynucleotide
cacgagtgatggaagtg

SEQ ID NO: 10484 - DNA, 17 bp, Artificial Sequence
  Synthetic Polynucleotide
tagataagtgctgggac

SEQ ID NO: 10485 - DNA, 17 bp, Artificial Sequence
  Synthetic Polynucleotide
gaggttgatgtcctggt

SEQ ID NO: 10486 - DNA, 18 bp, Artificial Sequence
  Synthetic Polynucleotide
tatagtagtagtgcgtgc

SEQ ID NO: 10487 - DNA, 17 bp, Artificial Sequence
  Synthetic Polynucleotide
tacctaagtgtgcgagc

SEQ ID NO: 10488 - DNA, 17 bp, Artificial Sequence
  Synthetic Polynucleotide
caaatgtggagcggaat

SEQ ID NO: 10489 - DNA, 17 bp, Artificial Sequence
  Synthetic Polynucleotide
gcagtgaagacgaagta

SEQ ID NO: 10490 - DNA, 18 bp, Artificial Sequence
  Synthetic Polynucleotide
ggttatcggatgtgattc

SEQ ID NO: 10491 - DNA, 17 bp, Artificial Sequence
  Synthetic Polynucleotide
aaatttctggggtggta

SEQ ID NO: 10492 - DNA, 17 bp, Artificial Sequence
  Synthetic Polynucleotide
ttctgtggttgtggatg

SEQ ID NO: 10493 - DNA, 17 bp, Artificial Sequence
  Synthetic Polynucleotide
ggggaggggtgtaaata

SEQ ID NO: 10494 - DNA, 18 bp, Artificial Sequence
  Synthetic Polynucleotide
gtctttagatggtggtcg

SEQ ID NO: 10495 - DNA, 18 bp, Artificial Sequence
  Synthetic Polynucleotide
gttgcaggagaagaattt

SEQ ID NO: 10496 - DNA, 17 bp, Artificial Sequence
  Synthetic Polynucleotide
gagtaaggggtatcacg

SEQ ID NO: 10497 - DNA, 17 bp, Artificial Sequence
  Synthetic Polynucleotide
cagtagaagtagggcag

SEQ ID NO: 10498 - DNA, 18 bp, Artificial Sequence
  Synthetic Polynucleotide
agcggtaagtagtaatgg

SEQ ID NO: 10499 - DNA, 18 bp, Artificial Sequence
  Synthetic Polynucleotide
atgttatgctgtgtgcat

SEQ ID NO: 10500 - DNA, 17 bp, Artificial Sequence
  Synthetic Polynucleotide
acggtatgagaagtgca

SEQ ID NO: 10501 - DNA, 17 bp, Artificial Sequence
  Synthetic Polynucleotide
aagcgaagcgaatgaga

SEQ ID NO: 10502 - DNA, 18 bp, Artificial Sequence
  Synthetic Polynucleotide
aattgtgtttgtgttcgt

SEQ ID NO: 10503 - DNA, 18 bp, Artificial Sequence
  Synthetic Polynucleotide
tgtaagcgtggtgacaac

SEQ ID NO: 10504 - DNA, 18 bp, Artificial Sequence
  Synthetic Polynucleotide
ccgggcggaagatgacta

SEQ ID NO: 10505 - DNA, 18 bp, Artificial Sequence
  Synthetic Polynucleotide
ctgtgtccattgaacaaa

SEQ ID NO: 10506 - DNA, 18 bp, Artificial Sequence
  Synthetic Polynucleotide
tgcaataattttggcaga

SEQ ID NO: 10507 - DNA, 17 bp, Artificial Sequence
  Synthetic Polynucleotide
gcgagtctgtgggtgta

SEQ ID NO: 10508 - DNA, 18 bp, Artificial Sequence
  Synthetic Polynucleotide
tctggatctatgtatgga

SEQ ID NO: 10509 - DNA, 17 bp, Artificial Sequence
  Synthetic Polynucleotide
aagtggtgatgtgggca

SEQ ID NO: 10510 - DNA, 17 bp, Artificial Sequence
  Synthetic Polynucleotide
cgttagggctatgtggc

SEQ ID NO: 10511 - DNA, 18 bp, Artificial Sequence
  Synthetic Polynucleotide
ccttttggtttatgggta

SEQ ID NO: 10512 - DNA, 17 bp, Artificial Sequence
  Synthetic Polynucleotide
cccttgtggtgacaacg

SEQ ID NO: 10513 - DNA, 18 bp, Artificial Sequence
  Synthetic Polynucleotide
caatgcggagtgtcggaa

SEQ ID NO: 10514 - DNA, 18 bp, Artificial Sequence
  Synthetic Polynucleotide
atgggaataagaacagga

SEQ ID NO: 10515 - DNA, 17 bp, Artificial Sequence
  Synthetic Polynucleotide
aagtggtgtggaggcta

SEQ ID NO: 10516 - DNA, 18 bp, Artificial Sequence
  Synthetic Polynucleotide
aaggcttttgtggttttg

SEQ ID NO: 10517 - DNA, 18 bp, Artificial Sequence
  Synthetic Polynucleotide
ggtcgttttgaaagaacg

SEQ ID NO: 10518 - DNA, 18 bp, Artificial Sequence
  Synthetic Polynucleotide
tggaaaagtggggttagg

SEQ ID NO: 10519 - DNA, 18 bp, Artificial Sequence
  Synthetic Polynucleotide
caggtgaatgggtggtaa

SEQ ID NO: 10520 - DNA, 17 bp, Artificial Sequence
  Synthetic Polynucleotide
aacagggtgtgatttcc

SEQ ID NO: 10521 - DNA, 17 bp, Artificial Sequence
  Synthetic Polynucleotide
ctatgggtggtgtggta

SEQ ID NO: 10522 - DNA, 18 bp, Artificial Sequence
  Synthetic Polynucleotide
catggttaagtacggtgc

SEQ ID NO: 10523 - DNA, 17 bp, Artificial Sequence
  Synthetic Polynucleotide
gtgtgggacgaagttta

SEQ ID NO: 10524 - DNA, 18 bp, Artificial Sequence
  Synthetic Polynucleotide
ctcttattgtgcgtgcag

SEQ ID NO: 10525 - DNA, 17 bp, Artificial Sequence
  Synthetic Polynucleotide
gtcagtgagaagtgcaa

SEQ ID NO: 10526 - DNA, 18 bp, Artificial Sequence
  Synthetic Polynucleotide
ctggtgtgtgcaagtggt

SEQ ID NO: 10527 - DNA, 18 bp, Artificial Sequence
  Synthetic Polynucleotide
gcttggaagaagacgaag

SEQ ID NO: 10528 - DNA, 18 bp, Artificial Sequence
  Synthetic Polynucleotide
atggtgcaaagaatttga

SEQ ID NO: 10529 - DNA, 17 bp, Artificial Sequence
  Synthetic Polynucleotide
cggctaagatgtggaac

SEQ ID NO: 10530 - DNA, 18 bp, Artificial Sequence
  Synthetic Polynucleotide
cttggcgaagattttcac

SEQ ID NO: 10531 - DNA, 18 bp, Artificial Sequence
  Synthetic Polynucleotide
catcggtaagtagacgga

SEQ ID NO: 10532 - DNA, 17 bp, Artificial Sequence
  Synthetic Polynucleotide
cgaaggtttctgggtat

SEQ ID NO: 10533 - DNA, 17 bp, Artificial Sequence
  Synthetic Polynucleotide
catgtgtgggacgtatg

SEQ ID NO: 10534 - DNA, 18 bp, Artificial Sequence
  Synthetic Polynucleotide
cagtggttttatggcttt

SEQ ID NO: 10535 - DNA, 17 bp, Artificial Sequence
  Synthetic Polynucleotide
gttggcgggtttggcat

SEQ ID NO: 10536 - DNA, 17 bp, Artificial Sequence
  Synthetic Polynucleotide
taagttgtgtggtggca

SEQ ID NO: 10537 - DNA, 17 bp, Artificial Sequence
  Synthetic Polynucleotide
agtagcgggaagagatg

SEQ ID NO: 10538 - DNA, 18 bp, Artificial Sequence
  Synthetic Polynucleotide
cctaataaatgcgggaac

SEQ ID NO: 10539 - DNA, 18 bp, Artificial Sequence
  Synthetic Polynucleotide
ccgggagtattttgtggg

SEQ ID NO: 10540 - DNA, 17 bp, Artificial Sequence
  Synthetic Polynucleotide
ggacggggttaatagtg

SEQ ID NO: 10541 - DNA, 18 bp, Artificial Sequence
  Synthetic Polynucleotide
gatgttgctaagtgacta

SEQ ID NO: 10542 - DNA, 18 bp, Artificial Sequence
  Synthetic Polynucleotide
ttagtgacgaatgctgaa

SEQ ID NO: 10543 - DNA, 17 bp, Artificial Sequence
  Synthetic Polynucleotide
cacggaggtaatgtttg

SEQ ID NO: 10544 - DNA, 17 bp, Artificial Sequence
  Synthetic Polynucleotide
atcagaagtgtgtgctt

SEQ ID NO: 10545 - DNA, 18 bp, Artificial Sequence
  Synthetic Polynucleotide
cgtggctgtgatatatta

SEQ ID NO: 10546 - DNA, 18 bp, Artificial Sequence
  Synthetic Polynucleotide
agtgtgatatgtatgggg

SEQ ID NO: 10547 - DNA, 17 bp, Artificial Sequence
  Synthetic Polynucleotide
tttgacgagcggggctg

SEQ ID NO: 10548 - DNA, 18 bp, Artificial Sequence
  Synthetic Polynucleotide
gatgagttagacgtgact

SEQ ID NO: 10549 - DNA, 17 bp, Artificial Sequence
  Synthetic Polynucleotide
cgagaaggggaacaatt

SEQ ID NO: 10550 - DNA, 18 bp, Artificial Sequence
  Synthetic Polynucleotide
agatggtgtatccatgta

SEQ ID NO: 10551 - DNA, 17 bp, Artificial Sequence
  Synthetic Polynucleotide
ttgggtacgagtgtgct

SEQ ID NO: 10552 - DNA, 18 bp, Artificial Sequence
  Synthetic Polynucleotide
caaagtgcgttttgtgaa

SEQ ID NO: 10553 - DNA, 18 bp, Artificial Sequence
  Synthetic Polynucleotide
tcgaggtgtgttaggctc

SEQ ID NO: 10554 - DNA, 18 bp, Artificial Sequence
  Synthetic Polynucleotide
taagtggggcagggtgac

SEQ ID NO: 10555 - DNA, 17 bp, Artificial Sequence
  Synthetic Polynucleotide
atcgaagaagggtgttc

SEQ ID NO: 10556 - DNA, 18 bp, Artificial Sequence
  Synthetic Polynucleotide
aggtggaggtgaagtgtc

SEQ ID NO: 10557 - DNA, 17 bp, Artificial Sequence
  Synthetic Polynucleotide
tagtgcgtggtttaaat

SEQ ID NO: 10558 - DNA, 18 bp, Artificial Sequence
  Synthetic Polynucleotide
atatttcgggctaagtcg

SEQ ID NO: 10559 - DNA, 17 bp, Artificial Sequence
  Synthetic Polynucleotide
tcaatgttgatgtgcat

SEQ ID NO: 10560 - DNA, 18 bp, Artificial Sequence
  Synthetic Polynucleotide
agtagaagaagtttcgga

SEQ ID NO: 10561 - DNA, 18 bp, Artificial Sequence
  Synthetic Polynucleotide
ccaacgaagtatttccta

SEQ ID NO: 10562 - DNA, 18 bp, Artificial Sequence
  Synthetic Polynucleotide
ggttaagttatgaagcgg

SEQ ID NO: 10563 - DNA, 17 bp, Artificial Sequence
  Synthetic Polynucleotide
ttttgtgctggggctgg

SEQ ID NO: 10564 - DNA, 17 bp, Artificial Sequence
  Synthetic Polynucleotide
tcgggtgttagaagttt

SEQ ID NO: 10565 - DNA, 18 bp, Artificial Sequence
  Synthetic Polynucleotide
cgcggtgaatgtttatgt

SEQ ID NO: 10566 - DNA, 17 bp, Artificial Sequence
  Synthetic Polynucleotide
tctaagggtgatggtgt

SEQ ID NO: 10567 - DNA, 18 bp, Artificial Sequence
  Synthetic Polynucleotide
ttgtgtggctgatgtggc

SEQ ID NO: 10568 - DNA, 18 bp, Artificial Sequence
  Synthetic Polynucleotide
gggtatggcgagttaacg

SEQ ID NO: 10569 - DNA, 18 bp, Artificial Sequence
  Synthetic Polynucleotide
taaaatgtgaacgggatt

SEQ ID NO: 10570 - DNA, 18 bp, Artificial Sequence
  Synthetic Polynucleotide
cggctgttagggctttta

SEQ ID NO: 10571 - DNA, 18 bp, Artificial Sequence
  Synthetic Polynucleotide
gcaagtaatgcaagtgaa

SEQ ID NO: 10572 - DNA, 17 bp, Artificial Sequence
  Synthetic Polynucleotide
aagctgatggtggcaag

SEQ ID NO: 10573 - DNA, 17 bp, Artificial Sequence
  Synthetic Polynucleotide
caagtgtggcgagcgtg

SEQ ID NO: 10574 - DNA, 18 bp, Artificial Sequence
  Synthetic Polynucleotide
cgtgtggcgggtttggca

SEQ ID NO: 10575 - DNA, 18 bp, Artificial Sequence
  Synthetic Polynucleotide
tcggagtgtgaataatgg

SEQ ID NO: 10576 - DNA, 17 bp, Artificial Sequence
  Synthetic Polynucleotide
cctaggtgctagaatgc

SEQ ID NO: 10577 - DNA, 17 bp, Artificial Sequence
  Synthetic Polynucleotide
gtttgtgtaagcggaag

SEQ ID NO: 10578 - DNA, 18 bp, Artificial Sequence
  Synthetic Polynucleotide
acgtgtggcgagtatggc

SEQ ID NO: 10579 - DNA, 17 bp, Artificial Sequence
  Synthetic Polynucleotide
ccatgatgaaagtgtgc

SEQ ID NO: 10580 - DNA, 18 bp, Artificial Sequence
  Synthetic Polynucleotide
catggtgatgaagtcgag

SEQ ID NO: 10581 - DNA, 18 bp, Artificial Sequence
  Synthetic Polynucleotide
gaaattgtatcggatgcc

SEQ ID NO: 10582 - DNA, 18 bp, Artificial Sequence
  Synthetic Polynucleotide
ggagaacgagaatacagg

SEQ ID NO: 10583 - DNA, 18 bp, Artificial Sequence
  Synthetic Polynucleotide
agtgcgggtatgagaatt

SEQ ID NO: 10584 - DNA, 17 bp, Artificial Sequence
  Synthetic Polynucleotide
cgacgtaagtagtggta

SEQ ID NO: 10585 - DNA, 18 bp, Artificial Sequence
  Synthetic Polynucleotide
tcttggtacgggagtata

SEQ ID NO: 10586 - DNA, 17 bp, Artificial Sequence
  Synthetic Polynucleotide
ccatgaagcgagtcttt

SEQ ID NO: 10587 - DNA, 18 bp, Artificial Sequence
  Synthetic Polynucleotide
tatttgtgttgctatgct

SEQ ID NO: 10588 - DNA, 18 bp, Artificial Sequence
  Synthetic Polynucleotide
catgtgtgggctattatc

SEQ ID NO: 10589 - DNA, 17 bp, Artificial Sequence
  Synthetic Polynucleotide
gtggcaggtgtggcggc

SEQ ID NO: 10590 - DNA, 18 bp, Artificial Sequence
  Synthetic Polynucleotide
gtatggcgagtatggtcg

SEQ ID NO: 10591 - DNA, 18 bp, Artificial Sequence
  Synthetic Polynucleotide
aagagtgtaagtggtgcg

SEQ ID NO: 10592 - DNA, 17 bp, Artificial Sequence
  Synthetic Polynucleotide
tcatgatgtgctctctc

SEQ ID NO: 10593 - DNA, 17 bp, Artificial Sequence
  Synthetic Polynucleotide
aatggtgtgaatcgggc

SEQ ID NO: 10594 - DNA, 18 bp, Artificial Sequence
  Synthetic Polynucleotide
gtcggaatgaatgacaat

SEQ ID NO: 10595 - DNA, 18 bp, Artificial Sequence
  Synthetic Polynucleotide
cgaatgatagtagtggcg

SEQ ID NO: 10596 - DNA, 17 bp, Artificial Sequence
  Synthetic Polynucleotide
gttggcgggtttggtag

SEQ ID NO: 10597 - DNA, 18 bp, Artificial Sequence
  Synthetic Polynucleotide
gcggaatggtgtaagatt

SEQ ID NO: 10598 - DNA, 18 bp, Artificial Sequence
  Synthetic Polynucleotide
cgtgagctaagtgaattt

SEQ ID NO: 10599 - DNA, 18 bp, Artificial Sequence
  Synthetic Polynucleotide
taagcgagtgtgttattg

SEQ ID NO: 10600 - DNA, 17 bp, Artificial Sequence
  Synthetic Polynucleotide
taagtgtggcggatatg

SEQ ID NO: 10601 - DNA, 17 bp, Artificial Sequence
  Synthetic Polynucleotide
gggatgttgctgtgtcg

SEQ ID NO: 10602 - DNA, 17 bp, Artificial Sequence
  Synthetic Polynucleotide
cgaatgatgtggctgtc

SEQ ID NO: 10603 - DNA, 18 bp, Artificial Sequence
  Synthetic Polynucleotide
tacggagaacggtgattg

SEQ ID NO: 10604 - DNA, 18 bp, Artificial Sequence
  Synthetic Polynucleotide
catgaactaaatgacgga

SEQ ID NO: 10605 - DNA, 17 bp, Artificial Sequence
  Synthetic Polynucleotide
atgggtttgatgagtgg

SEQ ID NO: 10606 - DNA, 18 bp, Artificial Sequence
  Synthetic Polynucleotide
aatgtgtggcgagaactt

SEQ ID NO: 10607 - DNA, 18 bp, Artificial Sequence
  Synthetic Polynucleotide
aaagcgaggtgattagta

SEQ ID NO: 10608 - DNA, 17 bp, Artificial Sequence
  Synthetic Polynucleotide
cctaaagcgaggtgaaa

SEQ ID NO: 10609 - DNA, 18 bp, Artificial Sequence
  Synthetic Polynucleotide
gcgaattatgtagacggc

SEQ ID NO: 10610 - DNA, 18 bp, Artificial Sequence
  Synthetic Polynucleotide
tatttgggtggttgttat

SEQ ID NO: 10611 - DNA, 17 bp, Artificial Sequence
  Synthetic Polynucleotide
cggcgagtgttaaatgt

SEQ ID NO: 10612 - DNA, 17 bp, Artificial Sequence
  Synthetic Polynucleotide
ttcttttgaagggtgga

SEQ ID NO: 10613 - DNA, 18 bp, Artificial Sequence
  Synthetic Polynucleotide
gtcaggggcaaagattat

SEQ ID NO: 10614 - DNA, 18 bp, Artificial Sequence
  Synthetic Polynucleotide
tgatgtggggcaagtgtg

SEQ ID NO: 10615 - DNA, 17 bp, Artificial Sequence
  Synthetic Polynucleotide
gatattttgggcgaggc

SEQ ID NO: 10616 - DNA, 17 bp, Artificial Sequence
  Synthetic Polynucleotide
ggatgggtttcctagag

SEQ ID NO: 10617 - DNA, 18 bp, Artificial Sequence
  Synthetic Polynucleotide
ggctgtggtcttttatta

SEQ ID NO: 10618 - DNA, 18 bp, Artificial Sequence
  Synthetic Polynucleotide
tgatgtggcggatgtggc

SEQ ID NO: 10619 - DNA, 18 bp, Artificial Sequence
  Synthetic Polynucleotide
gttttagcgtatagggca

SEQ ID NO: 10620 - DNA, 18 bp, Artificial Sequence
  Synthetic Polynucleotide
ccgagtgatagtagggct

SEQ ID NO: 10621 - DNA, 17 bp, Artificial Sequence
  Synthetic Polynucleotide
aatgtccttgtggagag

SEQ ID NO: 10622 - DNA, 17 bp, Artificial Sequence
  Synthetic Polynucleotide
catatgtggcaggagtg

SEQ ID NO: 10623 - DNA, 17 bp, Artificial Sequence
  Synthetic Polynucleotide
aactagatgtgacgggg

SEQ ID NO: 10624 - DNA, 17 bp, Artificial Sequence
  Synthetic Polynucleotide
gagctggaaggtgtcgt

SEQ ID NO: 10625 - DNA, 18 bp, Artificial Sequence
  Synthetic Polynucleotide
cgtggcgttaagataagg

SEQ ID NO: 10626 - DNA, 17 bp, Artificial Sequence
  Synthetic Polynucleotide
tgcttgtgaagaacggt

SEQ ID NO: 10627 - DNA, 17 bp, Artificial Sequence
  Synthetic Polynucleotide
catgaaggtggcggggc

SEQ ID NO: 10628 - DNA, 17 bp, Artificial Sequence
  Synthetic Polynucleotide
cgttaagtaatgcggta

SEQ ID NO: 10629 - DNA, 17 bp, Artificial Sequence
  Synthetic Polynucleotide
tcgggagaaataagtgc

SEQ ID NO: 10630 - DNA, 18 bp, Artificial Sequence
  Synthetic Polynucleotide
ggtgtatggctaaattga

SEQ ID NO: 10631 - DNA, 18 bp, Artificial Sequence
  Synthetic Polynucleotide
gcttgtgcgtgtttgaaa

SEQ ID NO: 10632 - DNA, 18 bp, Artificial Sequence
  Synthetic Polynucleotide
gctcttgtgagaatttcc

SEQ ID NO: 10633 - DNA, 17 bp, Artificial Sequence
  Synthetic Polynucleotide
gctctgatgatacggag

SEQ ID NO: 10634 - DNA, 17 bp, Artificial Sequence
  Synthetic Polynucleotide
tccttgtatggtgcggc

SEQ ID NO: 10635 - DNA, 17 bp, Artificial Sequence
  Synthetic Polynucleotide
tgtttgtgagacggtaa

SEQ ID NO: 10636 - DNA, 18 bp, Artificial Sequence
  Synthetic Polynucleotide
tctagtcgggaagatttt

SEQ ID NO: 10637 - DNA, 18 bp, Artificial Sequence
  Synthetic Polynucleotide
gtaaatgtggcgagcgtg

SEQ ID NO: 10638 - DNA, 18 bp, Artificial Sequence
  Synthetic Polynucleotide
tcgaaggttagatttcca

SEQ ID NO: 10639 - DNA, 18 bp, Artificial Sequence
  Synthetic Polynucleotide
attgggttacgggaataa

SEQ ID NO: 10640 - DNA, 17 bp, Artificial Sequence
  Synthetic Polynucleotide
acgaataagtgcgagtt

SEQ ID NO: 10641 - DNA, 17 bp, Artificial Sequence
  Synthetic Polynucleotide
tgggtcgtgagtgagac

SEQ ID NO: 10642 - DNA, 17 bp, Artificial Sequence
  Synthetic Polynucleotide
gcaaatcggtgtttcaa

SEQ ID NO: 10643 - DNA, 17 bp, Artificial Sequence
  Synthetic Polynucleotide
tctacagtagcaaggga

SEQ ID NO: 10644 - DNA, 17 bp, Artificial Sequence
  Synthetic Polynucleotide
tgctgccacaggatttt

SEQ ID NO: 10645 - DNA, 17 bp, Artificial Sequence
  Synthetic Polynucleotide
ggagctgcccctggaca

SEQ ID NO: 10646 - DNA, 18 bp, Artificial Sequence
  Synthetic Polynucleotide
ttgcctttacttctaggc

SEQ ID NO: 10647 - DNA, 17 bp, Artificial Sequence
  Synthetic Polynucleotide
cagaccacaaactggtc

SEQ ID NO: 10648 - DNA, 18 bp, Artificial Sequence
  Synthetic Polynucleotide
aacagaaaatgtgccaaa

SEQ ID NO: 10649 - DNA, 18 bp, Artificial Sequence
  Synthetic Polynucleotide
tattgtttccccaagaag

SEQ ID NO: 10650 - DNA, 17 bp, Artificial Sequence
  Synthetic Polynucleotide
cacaggtaagactgggg

SEQ ID NO: 10651 - DNA, 17 bp, Artificial Sequence
  Synthetic Polynucleotide
gaataccctcatggagg

SEQ ID NO: 10652 - DNA, 17 bp, Artificial Sequence
  Synthetic Polynucleotide
ccgctctcttcaggttc

SEQ ID NO: 10653 - DNA, 17 bp, Artificial Sequence
  Synthetic Polynucleotide
gctgctaaggttgtttt

SEQ ID NO: 10654 - DNA, 18 bp, Artificial Sequence
  Synthetic Polynucleotide
tccttttggaactccttg

SEQ ID NO: 10655 - DNA, 17 bp, Artificial Sequence
  Synthetic Polynucleotide
accaccacacacacagg

SEQ ID NO: 10656 - DNA, 17 bp, Artificial Sequence
  Synthetic Polynucleotide
ggccgttacatagcctt

SEQ ID NO: 10657 - DNA, 18 bp, Artificial Sequence
  Synthetic Polynucleotide
acaaagaggcccaactcc

SEQ ID NO: 10658 - DNA, 18 bp, Artificial Sequence
  Synthetic Polynucleotide
gggaggaaagtacatcta

SEQ ID NO: 10659 - DNA, 17 bp, Artificial Sequence
  Synthetic Polynucleotide
tcctctgagacccctat

SEQ ID NO: 10660 - DNA, 17 bp, Artificial Sequence
  Synthetic Polynucleotide
cggttcgtttccatttg

SEQ ID NO: 10661 - DNA, 17 bp, Artificial Sequence
  Synthetic Polynucleotide
caacagatgctagttgc

SEQ ID NO: 10662 - DNA, 18 bp, Artificial Sequence
  Synthetic Polynucleotide
gggacacggttgagtaac

SEQ ID NO: 10663 - DNA, 18 bp, Artificial Sequence
  Synthetic Polynucleotide
tgctaactctctggactg

SEQ ID NO: 10664 - DNA, 18 bp, Artificial Sequence
  Synthetic Polynucleotide
attgatccttttcgctgg

SEQ ID NO: 10665 - DNA, 17 bp, Artificial Sequence
  Synthetic Polynucleotide
tcacaatgctcttccca

SEQ ID NO: 10666 - DNA, 18 bp, Artificial Sequence
  Synthetic Polynucleotide
caaacactgccacaacag

SEQ ID NO: 10667 - DNA, 18 bp, Artificial Sequence
  Synthetic Polynucleotide
tgtgcaatagaccaaatg

SEQ ID NO: 10668 - DNA, 18 bp, Artificial Sequence
  Synthetic Polynucleotide
caacacacgttgcacttt

SEQ ID NO: 10669 - DNA, 17 bp, Artificial Sequence
  Synthetic Polynucleotide
ggatctgccatttcagt

SEQ ID NO: 10670 - DNA, 17 bp, Artificial Sequence
  Synthetic Polynucleotide
gctgtctggactgattc

SEQ ID NO: 10671 - DNA, 17 bp, Artificial Sequence
  Synthetic Polynucleotide
acgtttccatccaagcc

SEQ ID NO: 10672 - DNA, 17 bp, Artificial Sequence
  Synthetic Polynucleotide
ggaatgtgggtgatgat

SEQ ID NO: 10673 - DNA, 17 bp, Artificial Sequence
  Synthetic Polynucleotide
aaaccatatcgtggcat

SEQ ID NO: 10674 - DNA, 17 bp, Artificial Sequence
  Synthetic Polynucleotide
atggtttggtgcattga

SEQ ID NO: 10675 - DNA, 17 bp, Artificial Sequence
  Synthetic Polynucleotide
ttccactgtgtgtctct

SEQ ID NO: 10676 - DNA, 17 bp, Artificial Sequence
  Synthetic Polynucleotide
atatctggtgtctgggt

SEQ ID NO: 10677 - DNA, 17 bp, Artificial Sequence
  Synthetic Polynucleotide
aagcattgcgaggaaaa

SEQ ID NO: 10678 - DNA, 17 bp, Artificial Sequence
  Synthetic Polynucleotide
ggagcttctggtgatcc

SEQ ID NO: 10679 - DNA, 18 bp, Artificial Sequence
  Synthetic Polynucleotide
ttgctgtgtgcctttctg

SEQ ID NO: 10680 - DNA, 17 bp, Artificial Sequence
  Synthetic Polynucleotide
gcgctgaagaattcgaa

SEQ ID NO: 10681 - DNA, 18 bp, Artificial Sequence
  Synthetic Polynucleotide
aattggtgctgctgtgaa

SEQ ID NO: 10682 - DNA, 17 bp, Artificial Sequence
  Synthetic Polynucleotide
tatgtgactgatcctga

SEQ ID NO: 10683 - DNA, 17 bp, Artificial Sequence
  Synthetic Polynucleotide
gatccatctggtgttgc

SEQ ID NO: 10684 - DNA, 17 bp, Artificial Sequence
  Synthetic Polynucleotide
atgagatcctgtgagcg

SEQ ID NO: 10685 - DNA, 17 bp, Artificial Sequence
  Synthetic Polynucleotide
agaagtgtgtgcatgtt

SEQ ID NO: 10686 - DNA, 17 bp, Artificial Sequence
  Synthetic Polynucleotide
gcaagttgtttggactt

SEQ ID NO: 10687 - DNA, 18 bp, Artificial Sequence
  Synthetic Polynucleotide
ttctccaacctttcttcc

SEQ ID NO: 10688 - DNA, 17 bp, Artificial Sequence
  Synthetic Polynucleotide
gtgcgtacaacgagttc

SEQ ID NO: 10689 - DNA, 17 bp, Artificial Sequence
  Synthetic Polynucleotide
tggctgtccactgttat

SEQ ID NO: 10690 - DNA, 18 bp, Artificial Sequence
  Synthetic Polynucleotide
tccataccttttgaatgc

SEQ ID NO: 10691 - DNA, 17 bp, Artificial Sequence
  Synthetic Polynucleotide
gaccatgagtgtgttgt

SEQ ID NO: 10692 - DNA, 17 bp, Artificial Sequence
  Synthetic Polynucleotide
gggtgggtgtattgtga

SEQ ID NO: 10693 - DNA, 17 bp, Artificial Sequence
  Synthetic Polynucleotide
ggctgtgtgcctctctg

SEQ ID NO: 10694 - DNA, 18 bp, Artificial Sequence
  Synthetic Polynucleotide
agcgtatattgaaatgcg

SEQ ID NO: 10695 - DNA, 17 bp, Artificial Sequence
  Synthetic Polynucleotide
ggttgcatcttgtcaaa

SEQ ID NO: 10696 - DNA, 17 bp, Artificial Sequence
  Synthetic Polynucleotide
atactttgtggtgcgag

SEQ ID NO: 10697 - DNA, 18 bp, Artificial Sequence
  Synthetic Polynucleotide
accaagtttcattgttcg

SEQ ID NO: 10698 - DNA, 17 bp, Artificial Sequence
  Synthetic Polynucleotide
atacctgggcgtgaatc

SEQ ID NO: 10699 - DNA, 17 bp, Artificial Sequence
  Synthetic Polynucleotide
gctgccttcatttgtgc

SEQ ID NO: 10700 - DNA, 18 bp, Artificial Sequence
  Synthetic Polynucleotide
tggtttggtgtatagaga

SEQ ID NO: 10701 - DNA, 18 bp, Artificial Sequence
  Synthetic Polynucleotide
cctcttcttgtgttccaa

SEQ ID NO: 10702 - DNA, 17 bp, Artificial Sequence
  Synthetic Polynucleotide
tggtgcattgagaatgg

SEQ ID NO: 10703 - DNA, 17 bp, Artificial Sequence
  Synthetic Polynucleotide
gccttcatctgcatgtg

SEQ ID NO: 10704 - DNA, 18 bp, Artificial Sequence
  Synthetic Polynucleotide
aaatgtgggtttggcgtg

SEQ ID NO: 10705 - DNA, 17 bp, Artificial Sequence
  Synthetic Polynucleotide
tctggtgcattgagaac

SEQ ID NO: 10706 - DNA, 17 bp, Artificial Sequence
  Synthetic Polynucleotide
gctgctgctttcatctg

SEQ ID NO: 10707 - DNA, 18 bp, Artificial Sequence
  Synthetic Polynucleotide
acttgaccgactatagct

SEQ ID NO: 10708 - DNA, 18 bp, Artificial Sequence
  Synthetic Polynucleotide
tgcctttctgtgtcctgc

SEQ ID NO: 10709 - DNA, 18 bp, Artificial Sequence
  Synthetic Polynucleotide
atgtcccatactggaaag

SEQ ID NO: 10710 - DNA, 17 bp, Artificial Sequence
  Synthetic Polynucleotide
ctccgaatccaagtcat

SEQ ID NO: 10711 - DNA, 18 bp, Artificial Sequence
  Synthetic Polynucleotide
tgctgaatgtgaatgaga

SEQ ID NO: 10712 - DNA, 17 bp, Artificial Sequence
  Synthetic Polynucleotide
gccttcctaagacgtgc

SEQ ID NO: 10713 - DNA, 18 bp, Artificial Sequence
  Synthetic Polynucleotide
tcaaactctcttctttgc

SEQ ID NO: 10714 - DNA, 17 bp, Artificial Sequence
  Synthetic Polynucleotide
gatgcgtagctgagata

SEQ ID NO: 10715 - DNA, 18 bp, Artificial Sequence
  Synthetic Polynucleotide
ttcaatttggcgtgtgta

SEQ ID NO: 10716 - DNA, 17 bp, Artificial Sequence
  Synthetic Polynucleotide
aaccttttgtccactgc

SEQ ID NO: 10717 - DNA, 17 bp, Artificial Sequence
  Synthetic Polynucleotide
ggtttgcgtgattacaa

SEQ ID NO: 10718 - DNA, 17 bp, Artificial Sequence
  Synthetic Polynucleotide
tgctgccttcatctgga

SEQ ID NO: 10719 - DNA, 17 bp, Artificial Sequence
  Synthetic Polynucleotide
ggtttggtgcatcgaga

SEQ ID NO: 10720 - DNA, 17 bp, Artificial Sequence
  Synthetic Polynucleotide
ctgctgctttcatctga

SEQ ID NO: 10721 - DNA, 18 bp, Artificial Sequence
  Synthetic Polynucleotide
aggctgttgttaaagagg

SEQ ID NO: 10722 - DNA, 18 bp, Artificial Sequence
  Synthetic Polynucleotide
atgtttgttgcgactatg

SEQ ID NO: 10723 - DNA, 18 bp, Artificial Sequence
  Synthetic Polynucleotide
ctggtttatgttgcaagc

SEQ ID NO: 10724 - DNA, 17 bp, Artificial Sequence
  Synthetic Polynucleotide
gtctctctgtgtcctct

SEQ ID NO: 10725 - DNA, 18 bp, Artificial Sequence
  Synthetic Polynucleotide
agcgtgattatgaggtca

SEQ ID NO: 10726 - DNA, 17 bp, Artificial Sequence
  Synthetic Polynucleotide
atcccaatcttccatga

SEQ ID NO: 10727 - DNA, 18 bp, Artificial Sequence
  Synthetic Polynucleotide
aagtctgtgttgatgact

SEQ ID NO: 10728 - DNA, 17 bp, Artificial Sequence
  Synthetic Polynucleotide
tctggtgttgctattgg

SEQ ID NO: 10729 - DNA, 17 bp, Artificial Sequence
  Synthetic Polynucleotide
gttggctgtattgtgac

SEQ ID NO: 10730 - DNA, 17 bp, Artificial Sequence
  Synthetic Polynucleotide
ccatctggtgttgctat

SEQ ID NO: 10731 - DNA, 18 bp, Artificial Sequence
  Synthetic Polynucleotide
agcgtgagtattttgcag

SEQ ID NO: 10732 - DNA, 17 bp, Artificial Sequence
  Synthetic Polynucleotide
gctcttgtgaactccat

SEQ ID NO: 10733 - DNA, 18 bp, Artificial Sequence
  Synthetic Polynucleotide
ggaggagtgtaaattcga

SEQ ID NO: 10734 - DNA, 17 bp, Artificial Sequence
  Synthetic Polynucleotide
tggtgctgctgtaaaag

SEQ ID NO: 10735 - DNA, 18 bp, Artificial Sequence
  Synthetic Polynucleotide
acagtttcaagggtttct

SEQ ID NO: 10736 - DNA, 18 bp, Artificial Sequence
  Synthetic Polynucleotide
cctggtggtgttgctgag

SEQ ID NO: 10737 - DNA, 18 bp, Artificial Sequence
  Synthetic Polynucleotide
tggttttgcctttcacta

SEQ ID NO: 10738 - DNA, 18 bp, Artificial Sequence
  Synthetic Polynucleotide
ggtgcatagatccatcat

SEQ ID NO: 10739 - DNA, 17 bp, Artificial Sequence
  Synthetic Polynucleotide
ggctagttacaacgagg

SEQ ID NO: 10740 - DNA, 17 bp, Artificial Sequence
  Synthetic Polynucleotide
gcttcaatcattgctgc

SEQ ID NO: 10741 - DNA, 18 bp, Artificial Sequence
  Synthetic Polynucleotide
tcaactctgttcttagca

SEQ ID NO: 10742 - DNA, 17 bp, Artificial Sequence
  Synthetic Polynucleotide
accatgagtgtgttgtc

SEQ ID NO: 10743 - DNA, 17 bp, Artificial Sequence
  Synthetic Polynucleotide
aacttagaccgttcgag

SEQ ID NO: 10744 - DNA, 17 bp, Artificial Sequence
  Synthetic Polynucleotide
agttctgggtgtccatc

SEQ ID NO: 10745 - DNA, 17 bp, Artificial Sequence
  Synthetic Polynucleotide
ttgacttctttgtcccc

SEQ ID NO: 10746 - DNA, 18 bp, Artificial Sequence
  Synthetic Polynucleotide
ctctgggcattgtagttt

SEQ ID NO: 10747 - DNA, 18 bp, Artificial Sequence
  Synthetic Polynucleotide
ttgtggctaccttagact

SEQ ID NO: 10748 - DNA, 18 bp, Artificial Sequence
  Synthetic Polynucleotide
tctctgactgaaatccag

SEQ ID NO: 10749 - DNA, 17 bp, Artificial Sequence
  Synthetic Polynucleotide
gggttcctagtgacgaa

SEQ ID NO: 10750 - DNA, 18 bp, Artificial Sequence
  Synthetic Polynucleotide
tagagcttcttttccgaa

SEQ ID NO: 10751 - DNA, 18 bp, Artificial Sequence
  Synthetic Polynucleotide
ttctggtgagaccatttt

SEQ ID NO: 10752 - DNA, 18 bp, Artificial Sequence
  Synthetic Polynucleotide
tcgtaaatgtgtattgca

SEQ ID NO: 10753 - DNA, 17 bp, Artificial Sequence
  Synthetic Polynucleotide
tgcctatccatctggct

SEQ ID NO: 10754 - DNA, 18 bp, Artificial Sequence
  Synthetic Polynucleotide
atttgtgtcaattgtccc

SEQ ID NO: 10755 - DNA, 18 bp, Artificial Sequence
  Synthetic Polynucleotide
tccataaccttaagtgcg

SEQ ID NO: 10756 - DNA, 18 bp, Artificial Sequence
  Synthetic Polynucleotide
ttgtttcgatccattagc

SEQ ID NO: 10757 - DNA, 18 bp, Artificial Sequence
  Synthetic Polynucleotide
aatctttcatcctgacgc

SEQ ID NO: 10758 - DNA, 17 bp, Artificial Sequence
  Synthetic Polynucleotide
tgatgatgtcgttcccg

SEQ ID NO: 10759 - DNA, 17 bp, Artificial Sequence
  Synthetic Polynucleotide
tgctttcttccgatctg

SEQ ID NO: 10760 - DNA, 18 bp, Artificial Sequence
  Synthetic Polynucleotide
ctccatgtttagagtgca

SEQ ID NO: 10761 - DNA, 18 bp, Artificial Sequence
  Synthetic Polynucleotide
ggccgagtataatgttgg

SEQ ID NO: 10762 - DNA, 18 bp, Artificial Sequence
  Synthetic Polynucleotide
ataggggtgtttctctcg

SEQ ID NO: 10763 - DNA, 18 bp, Artificial Sequence
  Synthetic Polynucleotide
gaatccatctgtgaggga

SEQ ID NO: 10764 - DNA, 17 bp, Artificial Sequence
  Synthetic Polynucleotide
ggtaagtgatcccaacg

SEQ ID NO: 10765 - DNA, 18 bp, Artificial Sequence
  Synthetic Polynucleotide
ttcttgttctgtcttcgc

SEQ ID NO: 10766 - DNA, 18 bp, Artificial Sequence
  Synthetic Polynucleotide
cattggtgtgattagtgg

SEQ ID NO: 10767 - DNA, 17 bp, Artificial Sequence
  Synthetic Polynucleotide
agtgcttccgtgtgccg

SEQ ID NO: 10768 - DNA, 17 bp, Artificial Sequence
  Synthetic Polynucleotide
cctggaattgtggctga

SEQ ID NO: 10769 - DNA, 18 bp, Artificial Sequence
  Synthetic Polynucleotide
caaagtgtatccatgtgc

SEQ ID NO: 10770 - DNA, 17 bp, Artificial Sequence
  Synthetic Polynucleotide
tctgccttaagtgatcc

SEQ ID NO: 10771 - DNA, 17 bp, Artificial Sequence
  Synthetic Polynucleotide
acttgattgcgtgtggt

SEQ ID NO: 10772 - DNA, 18 bp, Artificial Sequence
  Synthetic Polynucleotide
gtcaaattttggtgcatg

SEQ ID NO: 10773 - DNA, 18 bp, Artificial Sequence
  Synthetic Polynucleotide
aatccgagctgtgttaaa

SEQ ID NO: 10774 - DNA, 17 bp, Artificial Sequence
  Synthetic Polynucleotide
gctgttattgcctttga

SEQ ID NO: 10775 - DNA, 17 bp, Artificial Sequence
  Synthetic Polynucleotide
ggggctttgtatagtgg

SEQ ID NO: 10776 - DNA, 18 bp, Artificial Sequence
  Synthetic Polynucleotide
tcgtggtgtagtaatctt

SEQ ID NO: 10777 - DNA, 17 bp, Artificial Sequence
  Synthetic Polynucleotide
agctttctcccgactca

SEQ ID NO: 10778 - DNA, 18 bp, Artificial Sequence
  Synthetic Polynucleotide
agtcttttgcatccgact

SEQ ID NO: 10779 - DNA, 18 bp, Artificial Sequence
  Synthetic Polynucleotide
ggagatcattgtgttgtc

SEQ ID NO: 10780 - DNA, 17 bp, Artificial Sequence
  Synthetic Polynucleotide
tgtgttcgttcatgaca

SEQ ID NO: 10781 - DNA, 17 bp, Artificial Sequence
  Synthetic Polynucleotide
tcatcctactgtttgca

SEQ ID NO: 10782 - DNA, 17 bp, Artificial Sequence
  Synthetic Polynucleotide
ttgtgtgctgtgtgctg

SEQ ID NO: 10783 - DNA, 18 bp, Artificial Sequence
  Synthetic Polynucleotide
cctgtgcgtgtcctggcg

SEQ ID NO: 10784 - DNA, 18 bp, Artificial Sequence
  Synthetic Polynucleotide
tgtcccatctgtgtttgt

SEQ ID NO: 10785 - DNA, 17 bp, Artificial Sequence
  Synthetic Polynucleotide
gagtgttacgtgtgcaa

SEQ ID NO: 10786 - DNA, 18 bp, Artificial Sequence
  Synthetic Polynucleotide
gctgcgttctttgaactt

SEQ ID NO: 10787 - DNA, 18 bp, Artificial Sequence
  Synthetic Polynucleotide
tatcttgttttctgggtt

SEQ ID NO: 10788 - DNA, 18 bp, Artificial Sequence
  Synthetic Polynucleotide
gcgttttagtgattacgg

SEQ ID NO: 10789 - DNA, 18 bp, Artificial Sequence
  Synthetic Polynucleotide
tttagctttctcttggct

SEQ ID NO: 10790 - DNA, 18 bp, Artificial Sequence
  Synthetic Polynucleotide
gatggattcaccaaagga

SEQ ID NO: 10791 - DNA, 18 bp, Artificial Sequence
  Synthetic Polynucleotide
gcttctcctcctatttgt

SEQ ID NO: 10792 - DNA, 18 bp, Artificial Sequence
  Synthetic Polynucleotide
tacatcgggtacaagttc

SEQ ID NO: 10793 - DNA, 17 bp, Artificial Sequence
  Synthetic Polynucleotide
gcgcatgttgaagggga

SEQ ID NO: 10794 - DNA, 17 bp, Artificial Sequence
  Synthetic Polynucleotide
aaacgaggattgatgcc

SEQ ID NO: 10795 - DNA, 18 bp, Artificial Sequence
  Synthetic Polynucleotide
acacgcaaaatcacaatg

SEQ ID NO: 10796 - DNA, 18 bp, Artificial Sequence
  Synthetic Polynucleotide
tccattcttcatctccat

SEQ ID NO: 10797 - DNA, 17 bp, Artificial Sequence
  Synthetic Polynucleotide
ttcggtagacaaccttc

SEQ ID NO: 10798 - DNA, 18 bp, Artificial Sequence
  Synthetic Polynucleotide
tacaactcatgtccatgt

SEQ ID NO: 10799 - DNA, 17 bp, Artificial Sequence
  Synthetic Polynucleotide
tcgggatcgcttaacaa

SEQ ID NO: 10800 - DNA, 17 bp, Artificial Sequence
  Synthetic Polynucleotide
caatgttcagaggcaag

SEQ ID NO: 10801 - DNA, 18 bp, Artificial Sequence
  Synthetic Polynucleotide
aatattgacgcaaatgct

SEQ ID NO: 10802 - DNA, 17 bp, Artificial Sequence
  Synthetic Polynucleotide
aacgggttcgctagaca

SEQ ID NO: 10803 - DNA, 17 bp, Artificial Sequence
  Synthetic Polynucleotide
gatacgtttatgtccgc

SEQ ID NO: 10804 - DNA, 18 bp, Artificial Sequence
  Synthetic Polynucleotide
caggtggtttattgttgc

SEQ ID NO: 10805 - DNA, 18 bp, Artificial Sequence
  Synthetic Polynucleotide
cacaaacacagccttttg

SEQ ID NO: 10806 - DNA, 17 bp, Artificial Sequence
  Synthetic Polynucleotide
cgataagtgaaagtcgc

SEQ ID NO: 10807 - DNA, 18 bp, Artificial Sequence
  Synthetic Polynucleotide
ctcgggaactgtttcgtt

SEQ ID NO: 10808 - DNA, 18 bp, Artificial Sequence
  Synthetic Polynucleotide
actagtgggatggtcttt

SEQ ID NO: 10809 - DNA, 18 bp, Artificial Sequence
  Synthetic Polynucleotide
tgtggtattagtgcaggt

SEQ ID NO: 10810 - DNA, 18 bp, Artificial Sequence
  Synthetic Polynucleotide
tttccagcaaattgacca

SEQ ID NO: 10811 - DNA, 17 bp, Artificial Sequence
  Synthetic Polynucleotide
ccttctgctagatcaga

SEQ ID NO: 10812 - DNA, 18 bp, Artificial Sequence
  Synthetic Polynucleotide
gtacgatgcgaatgcagc

SEQ ID NO: 10813 - DNA, 18 bp, Artificial Sequence
  Synthetic Polynucleotide
gctgccatgctatccggg

SEQ ID NO: 10814 - DNA, 17 bp, Artificial Sequence
  Synthetic Polynucleotide
gccatgaacatcatcac

SEQ ID NO: 10815 - DNA, 17 bp, Artificial Sequence
  Synthetic Polynucleotide
ttgataacgtcagccag

SEQ ID NO: 10816 - DNA, 17 bp, Artificial Sequence
  Synthetic Polynucleotide
gttccgatcctccgcca

SEQ ID NO: 10817 - DNA, 18 bp, Artificial Sequence
  Synthetic Polynucleotide
gaccgacaaccatttggt

SEQ ID NO: 10818 - DNA, 18 bp, Artificial Sequence
  Synthetic Polynucleotide
gcgatatgattgactgtg

SEQ ID NO: 10819 - DNA, 18 bp, Artificial Sequence
  Synthetic Polynucleotide
tactcgtgaaattgaaca

SEQ ID NO: 10820 - DNA, 17 bp, Artificial Sequence
  Synthetic Polynucleotide
tcctttgccaattcaac

SEQ ID NO: 10821 - DNA, 17 bp, Artificial Sequence
  Synthetic Polynucleotide
atcagtggggattacgc

SEQ ID NO: 10822 - DNA, 18 bp, Artificial Sequence
  Synthetic Polynucleotide
taattttgtctccgccgc

SEQ ID NO: 10823 - DNA, 18 bp, Artificial Sequence
  Synthetic Polynucleotide
aacttcgaattagggagg

SEQ ID NO: 10824 - DNA, 18 bp, Artificial Sequence
  Synthetic Polynucleotide
agaatacttgccaccatt

SEQ ID NO: 10825 - DNA, 17 bp, Artificial Sequence
  Synthetic Polynucleotide
taaactaggaccgagag

SEQ ID NO: 10826 - DNA, 18 bp, Artificial Sequence
  Synthetic Polynucleotide
gctgtaccatcacctccg

SEQ ID NO: 10827 - DNA, 17 bp, Artificial Sequence
  Synthetic Polynucleotide
cgattctgcgactcatg

SEQ ID NO: 10828 - DNA, 17 bp, Artificial Sequence
  Synthetic Polynucleotide
gccacgtcacatctgtc

SEQ ID NO: 10829 - DNA, 18 bp, Artificial Sequence
  Synthetic Polynucleotide
acgctttagaaggaagct

SEQ ID NO: 10830 - DNA, 18 bp, Artificial Sequence
  Synthetic Polynucleotide
tgcccatcataagctatt

SEQ ID NO: 10831 - DNA, 18 bp, Artificial Sequence
  Synthetic Polynucleotide
atcctcgactttagctca

SEQ ID NO: 10832 - DNA, 18 bp, Artificial Sequence
  Synthetic Polynucleotide
acgtttggtcactccgaa

SEQ ID NO: 10833 - DNA, 18 bp, Artificial Sequence
  Synthetic Polynucleotide
acactcaatggacataga

SEQ ID NO: 10834 - DNA, 18 bp, Artificial Sequence
  Synthetic Polynucleotide
ggttccatcaataaggta

SEQ ID NO: 10835 - DNA, 18 bp, Artificial Sequence
  Synthetic Polynucleotide
ctgacacattcctacagg

SEQ ID NO: 10836 - DNA, 18 bp, Artificial Sequence
  Synthetic Polynucleotide
cacatcttcacaaaccaa

SEQ ID NO: 10837 - DNA, 18 bp, Artificial Sequence
  Synthetic Polynucleotide
ccaaagttacgcttttga

SEQ ID NO: 10838 - DNA, 17 bp, Artificial Sequence
  Synthetic Polynucleotide
atgatagatcactgccc

SEQ ID NO: 10839 - DNA, 17 bp, Artificial Sequence
  Synthetic Polynucleotide
ctgccagaaatgccttc

SEQ ID NO: 10840 - DNA, 18 bp, Artificial Sequence
  Synthetic Polynucleotide
attcacacttggactgaa

SEQ ID NO: 10841 - DNA, 18 bp, Artificial Sequence
  Synthetic Polynucleotide
gcaacgattcttacgatg

SEQ ID NO: 10842 - DNA, 17 bp, Artificial Sequence
  Synthetic Polynucleotide
accattcttactgctgg

SEQ ID NO: 10843 - DNA, 17 bp, Artificial Sequence
  Synthetic Polynucleotide
ggatcaacgccaaccgc

SEQ ID NO: 10844 - DNA, 17 bp, Artificial Sequence
  Synthetic Polynucleotide
tagtatctcctcagggg

SEQ ID NO: 10845 - DNA, 17 bp, Artificial Sequence
  Synthetic Polynucleotide
gatgttagaaagtgcgc

SEQ ID NO: 10846 - DNA, 18 bp, Artificial Sequence
  Synthetic Polynucleotide
gacattccagacaccgtc

SEQ ID NO: 10847 - DNA, 18 bp, Artificial Sequence
  Synthetic Polynucleotide
tgagattactcaaaccga

SEQ ID NO: 10848 - DNA, 18 bp, Artificial Sequence
  Synthetic Polynucleotide
cttcagtttatagccgcc

SEQ ID NO: 10849 - DNA, 18 bp, Artificial Sequence
  Synthetic Polynucleotide
tcaattccagatccttta

SEQ ID NO: 10850 - DNA, 17 bp, Artificial Sequence
  Synthetic Polynucleotide
tacgtctcctaactcac

SEQ ID NO: 10851 - DNA, 18 bp, Artificial Sequence
  Synthetic Polynucleotide
agttatccgataggttcg

SEQ ID NO: 10852 - DNA, 17 bp, Artificial Sequence
  Synthetic Polynucleotide
tgatattttgtcccgcg

SEQ ID NO: 10853 - DNA, 18 bp, Artificial Sequence
  Synthetic Polynucleotide
tgagatcagtaaccatgc

SEQ ID NO: 10854 - DNA, 18 bp, Artificial Sequence
  Synthetic Polynucleotide
ctccaccaacactcctcg

SEQ ID NO: 10855 - DNA, 17 bp, Artificial Sequence
  Synthetic Polynucleotide
ttccgacttgtaatgca

SEQ ID NO: 10856 - DNA, 18 bp, Artificial Sequence
  Synthetic Polynucleotide
gtcaaccgtcttatcact

SEQ ID NO: 10857 - DNA, 18 bp, Artificial Sequence
  Synthetic Polynucleotide
gtacaggaccgatacccc

SEQ ID NO: 10858 - DNA, 18 bp, Artificial Sequence
  Synthetic Polynucleotide
tatcattcagaaccgctt

SEQ ID NO: 10859 - DNA, 17 bp, Artificial Sequence
  Synthetic Polynucleotide
agaacgccgacccagtt

SEQ ID NO: 10860 - DNA, 17 bp, Artificial Sequence
  Synthetic Polynucleotide
ggctccaacactcttgg

SEQ ID NO: 10861 - DNA, 17 bp, Artificial Sequence
  Synthetic Polynucleotide
cgcaatgacacttcaaa

SEQ ID NO: 10862 - DNA, 18 bp, Artificial Sequence
  Synthetic Polynucleotide
attggtcataaccaccat

SEQ ID NO: 10863 - DNA, 18 bp, Artificial Sequence
  Synthetic Polynucleotide
gaagttcctgctcaaatg

SEQ ID NO: 10864 - DNA, 17 bp, Artificial Sequence
  Synthetic Polynucleotide
ggaaaatgcaccaccca

SEQ ID NO: 10865 - DNA, 18 bp, Artificial Sequence
  Synthetic Polynucleotide
cggaaataccgccattat

SEQ ID NO: 10866 - DNA, 17 bp, Artificial Sequence
  Synthetic Polynucleotide
attagccaccgcccaag

SEQ ID NO: 10867 - DNA, 17 bp, Artificial Sequence
  Synthetic Polynucleotide
ggtctatgcctcagaat

SEQ ID NO: 10868 - DNA, 17 bp, Artificial Sequence
  Synthetic Polynucleotide
gctcagaactacgacct

SEQ ID NO: 10869 - DNA, 17 bp, Artificial Sequence
  Synthetic Polynucleotide
tagttacacttgcccaa

SEQ ID NO: 10870 - DNA, 18 bp, Artificial Sequence
  Synthetic Polynucleotide
agctcaaacataatgcca

SEQ ID NO: 10871 - DNA, 17 bp, Artificial Sequence
  Synthetic Polynucleotide
ctgttttggatatgcgc

SEQ ID NO: 10872 - DNA, 18 bp, Artificial Sequence
  Synthetic Polynucleotide
cgcctcatcatcatccat

SEQ ID NO: 10873 - DNA, 17 bp, Artificial Sequence
  Synthetic Polynucleotide
atcgaaatgaaatgccc

SEQ ID NO: 10874 - DNA, 18 bp, Artificial Sequence
  Synthetic Polynucleotide
taaaacaccataaagggc

SEQ ID NO: 10875 - DNA, 17 bp, Artificial Sequence
  Synthetic Polynucleotide
ctgactcagtttggacc

SEQ ID NO: 10876 - DNA, 17 bp, Artificial Sequence
  Synthetic Polynucleotide
tccgtcaccagttccgt

SEQ ID NO: 10877 - DNA, 17 bp, Artificial Sequence
  Synthetic Polynucleotide
catactgccacagactc

SEQ ID NO: 10878 - DNA, 17 bp, Artificial Sequence
  Synthetic Polynucleotide
ttgcaattatcagccac

SEQ ID NO: 10879 - DNA, 18 bp, Artificial Sequence
  Synthetic Polynucleotide
aagtgcgatagagattga

SEQ ID NO: 10880 - DNA, 18 bp, Artificial Sequence
  Synthetic Polynucleotide
gagccaccaacttgtatg

SEQ ID NO: 10881 - DNA, 18 bp, Artificial Sequence
  Synthetic Polynucleotide
tactccaactctactcaa

SEQ ID NO: 10882 - DNA, 18 bp, Artificial Sequence
  Synthetic Polynucleotide
atttcaaccgctacaact

SEQ ID NO: 10883 - DNA, 18 bp, Artificial Sequence
  Synthetic Polynucleotide
aacgatgcgaatagattg

SEQ ID NO: 10884 - DNA, 17 bp, Artificial Sequence
  Synthetic Polynucleotide
gcataaggaagctacgt

SEQ ID NO: 10885 - DNA, 18 bp, Artificial Sequence
  Synthetic Polynucleotide
gcgattcaaagaagagac

SEQ ID NO: 10886 - DNA, 18 bp, Artificial Sequence
  Synthetic Polynucleotide
aacaaattgatatgcccc

SEQ ID NO: 10887 - DNA, 17 bp, Artificial Sequence
  Synthetic Polynucleotide
agcctaccgtttcagat

SEQ ID NO: 10888 - DNA, 18 bp, Artificial Sequence
  Synthetic Polynucleotide
tctgattatccataggga

SEQ ID NO: 10889 - DNA, 18 bp, Artificial Sequence
  Synthetic Polynucleotide
tctactactcagaccctc

SEQ ID NO: 10890 - DNA, 18 bp, Artificial Sequence
  Synthetic Polynucleotide
gcttaacgctccatcttt

SEQ ID NO: 10891 - DNA, 18 bp, Artificial Sequence
  Synthetic Polynucleotide
ggaaagactctcaaacca

SEQ ID NO: 10892 - DNA, 17 bp, Artificial Sequence
  Synthetic Polynucleotide
cacaccgccatcaacat

SEQ ID NO: 10893 - DNA, 17 bp, Artificial Sequence
  Synthetic Polynucleotide
tattgctactacctgga

SEQ ID NO: 10894 - DNA, 18 bp, Artificial Sequence
  Synthetic Polynucleotide
ctttgccagttttcatca

SEQ ID NO: 10895 - DNA, 17 bp, Artificial Sequence
  Synthetic Polynucleotide
gttcttgccgattcagc

SEQ ID NO: 10896 - DNA, 17 bp, Artificial Sequence
  Synthetic Polynucleotide
tcttagccaaccatcag

SEQ ID NO: 10897 - DNA, 17 bp, Artificial Sequence
  Synthetic Polynucleotide
ccgacctcaactacaca

SEQ ID NO: 10898 - DNA, 18 bp, Artificial Sequence
  Synthetic Polynucleotide
aatttgccaactctgcta

SEQ ID NO: 10899 - DNA, 17 bp, Artificial Sequence
  Synthetic Polynucleotide
gccgctaaaatgcctcg

SEQ ID NO: 10900 - DNA, 17 bp, Artificial Sequence
  Synthetic Polynucleotide
gtctcctacgacattgg

SEQ ID NO: 10901 - DNA, 18 bp, Artificial Sequence
  Synthetic Polynucleotide
cgtcctcatccagacctc

SEQ ID NO: 10902 - DNA, 17 bp, Artificial Sequence
  Synthetic Polynucleotide
tcagaactcaaatccgt

SEQ ID NO: 10903 - DNA, 18 bp, Artificial Sequence
  Synthetic Polynucleotide
aggaaattacctgccaat

SEQ ID NO: 10904 - DNA, 18 bp, Artificial Sequence
  Synthetic Polynucleotide
tcttcaacttagctgttc

SEQ ID NO: 10905 - DNA, 17 bp, Artificial Sequence
  Synthetic Polynucleotide
gattcatccgacttggt

SEQ ID NO: 10906 - DNA, 17 bp, Artificial Sequence
  Synthetic Polynucleotide
tgtcacctcaactccaa

SEQ ID NO: 10907 - DNA, 18 bp, Artificial Sequence
  Synthetic Polynucleotide
acaccaacagtttgctgg

SEQ ID NO: 10908 - DNA, 18 bp, Artificial Sequence
  Synthetic Polynucleotide
gattaggattgccgaata

SEQ ID NO: 10909 - DNA, 18 bp, Artificial Sequence
  Synthetic Polynucleotide
cgtcaccttgtctaattg

SEQ ID NO: 10910 - DNA, 18 bp, Artificial Sequence
  Synthetic Polynucleotide
tagaaactccgttttcac

SEQ ID NO: 10911 - DNA, 17 bp, Artificial Sequence
  Synthetic Polynucleotide
gaggaagaaagcccatg

SEQ ID NO: 10912 - DNA, 18 bp, Artificial Sequence
  Synthetic Polynucleotide
tcatgtcaactccaccaa

SEQ ID NO: 10913 - DNA, 18 bp, Artificial Sequence
  Synthetic Polynucleotide
gccagactatactcaaca

SEQ ID NO: 10914 - DNA, 17 bp, Artificial Sequence
  Synthetic Polynucleotide
gaagccacatctagacg

SEQ ID NO: 10915 - DNA, 18 bp, Artificial Sequence
  Synthetic Polynucleotide
agaatacctacaacgcca

SEQ ID NO: 10916 - DNA, 18 bp, Artificial Sequence
  Synthetic Polynucleotide
tcccaaagttccagaaat

SEQ ID NO: 10917 - DNA, 17 bp, Artificial Sequence
  Synthetic Polynucleotide
tatcatctcaacagtgc

SEQ ID NO: 10918 - DNA, 17 bp, Artificial Sequence
  Synthetic Polynucleotide
cgtcagaagactcactc

SEQ ID NO: 10919 - DNA, 17 bp, Artificial Sequence
  Synthetic Polynucleotide
tttgcctctgccttgac

SEQ ID NO: 10920 - DNA, 18 bp, Artificial Sequence
  Synthetic Polynucleotide
ccaagccatacattagct

SEQ ID NO: 10921 - DNA, 17 bp, Artificial Sequence
  Synthetic Polynucleotide
aggacccataaccaaca

SEQ ID NO: 10922 - DNA, 17 bp, Artificial Sequence
  Synthetic Polynucleotide
atctcacaaccgtccct

SEQ ID NO: 10923 - DNA, 17 bp, Artificial Sequence
  Synthetic Polynucleotide
ggccagatcagattaga

SEQ ID NO: 10924 - DNA, 18 bp, Artificial Sequence
  Synthetic Polynucleotide
gcctcatccatcattcca

SEQ ID NO: 10925 - DNA, 17 bp, Artificial Sequence
  Synthetic Polynucleotide
tacaacatcagtgggga

SEQ ID NO: 10926 - DNA, 17 bp, Artificial Sequence
  Synthetic Polynucleotide
ccgccacctgccatgaa

SEQ ID NO: 10927 - DNA, 18 bp, Artificial Sequence
  Synthetic Polynucleotide
cgatacatcaactcacca

SEQ ID NO: 10928 - DNA, 17 bp, Artificial Sequence
  Synthetic Polynucleotide
cacgacattggactcac

SEQ ID NO: 10929 - DNA, 18 bp, Artificial Sequence
  Synthetic Polynucleotide
ccgttaaagactccgcca

SEQ ID NO: 10930 - DNA, 18 bp, Artificial Sequence
  Synthetic Polynucleotide
tcttctcaactccaactg

SEQ ID NO: 10931 - DNA, 17 bp, Artificial Sequence
  Synthetic Polynucleotide
aattacacctgctccaa

SEQ ID NO: 10932 - DNA, 18 bp, Artificial Sequence
  Synthetic Polynucleotide
aaatacaccgacactccg

SEQ ID NO: 10933 - DNA, 18 bp, Artificial Sequence
  Synthetic Polynucleotide
ccagattactcatccacg

SEQ ID NO: 10934 - DNA, 18 bp, Artificial Sequence
  Synthetic Polynucleotide
tctcttgacaacatcaac

SEQ ID NO: 10935 - DNA, 17 bp, Artificial Sequence
  Synthetic Polynucleotide
ctgctcaactcagtggt

SEQ ID NO: 10936 - DNA, 17 bp, Artificial Sequence
  Synthetic Polynucleotide
tttctgtcacccagttt

SEQ ID NO: 10937 - DNA, 17 bp, Artificial Sequence
  Synthetic Polynucleotide
cttcacactacacacca

SEQ ID NO: 10938 - DNA, 18 bp, Artificial Sequence
  Synthetic Polynucleotide
tcatctccaactcaatcc

SEQ ID NO: 10939 - DNA, 18 bp, Artificial Sequence
  Synthetic Polynucleotide
ccttttgccattagcctt

SEQ ID NO: 10940 - DNA, 18 bp, Artificial Sequence
  Synthetic Polynucleotide
cttcgatcttcaccatct

SEQ ID NO: 10941 - DNA, 18 bp, Artificial Sequence
  Synthetic Polynucleotide
acaaattaacacatgccc

SEQ ID NO: 10942 - DNA, 17 bp, Artificial Sequence
  Synthetic Polynucleotide
acaaagctccgaacatc

SEQ ID NO: 10943 - DNA, 17 bp, Artificial Sequence
  Synthetic Polynucleotide
cccatctgctactgccg

SEQ ID NO: 10944 - DNA, 18 bp, Artificial Sequence
  Synthetic Polynucleotide
ccaaattaacaacgccaa

SEQ ID NO: 10945 - DNA, 18 bp, Artificial Sequence
  Synthetic Polynucleotide
gatgccatcatctatgcc

SEQ ID NO: 10946 - DNA, 17 bp, Artificial Sequence
  Synthetic Polynucleotide
ctttctcactacccgtc

SEQ ID NO: 10947 - DNA, 17 bp, Artificial Sequence
  Synthetic Polynucleotide
tctctcagatttgcccg

SEQ ID NO: 10948 - DNA, 17 bp, Artificial Sequence
  Synthetic Polynucleotide
aaattacatcacaccgc

SEQ ID NO: 10949 - DNA, 17 bp, Artificial Sequence
  Synthetic Polynucleotide
cgattacccatccagtt

SEQ ID NO: 10950 - DNA, 18 bp, Artificial Sequence
  Synthetic Polynucleotide
ccattagccaccatccat

SEQ ID NO: 10951 - DNA, 17 bp, Artificial Sequence
  Synthetic Polynucleotide
gactgccgaatacctaa

SEQ ID NO: 10952 - DNA, 17 bp, Artificial Sequence
  Synthetic Polynucleotide
tgtctagtggaggtctt

SEQ ID NO: 10953 - DNA, 17 bp, Artificial Sequence
  Synthetic Polynucleotide
ggtaagagaggtcttgc

SEQ ID NO: 10954 - DNA, 17 bp, Artificial Sequence
  Synthetic Polynucleotide
gcgggattatcttgagt

SEQ ID NO: 10955 - DNA, 17 bp, Artificial Sequence
  Synthetic Polynucleotide
acgtgatacatgagcca

SEQ ID NO: 10956 - DNA, 17 bp, Artificial Sequence
  Synthetic Polynucleotide
ctgggtttgcattttgg

SEQ ID NO: 10957 - DNA, 18 bp, Artificial Sequence
  Synthetic Polynucleotide
attatcagaaggagccac

SEQ ID NO: 10958 - DNA, 18 bp, Artificial Sequence
  Synthetic Polynucleotide
ggtcaggtattgggagat

SEQ ID NO: 10959 - DNA, 18 bp, Artificial Sequence
  Synthetic Polynucleotide
aacatgcgataacaacag

SEQ ID NO: 10960 - DNA, 18 bp, Artificial Sequence
  Synthetic Polynucleotide
ggtggtaaggagtactga

SEQ ID NO: 10961 - DNA, 18 bp, Artificial Sequence
  Synthetic Polynucleotide
gacggttggagggaaatt

SEQ ID NO: 10962 - DNA, 17 bp, Artificial Sequence
  Synthetic Polynucleotide
ctgaggagtggtacact

SEQ ID NO: 10963 - DNA, 18 bp, Artificial Sequence
  Synthetic Polynucleotide
gtaatgggagttccagaa

SEQ ID NO: 10964 - DNA, 17 bp, Artificial Sequence
  Synthetic Polynucleotide
ggagcaaagaaagaagc

SEQ ID NO: 10965 - DNA, 17 bp, Artificial Sequence
  Synthetic Polynucleotide
ggttgcggtggtaattg

SEQ ID NO: 10966 - DNA, 18 bp, Artificial Sequence
  Synthetic Polynucleotide
atcttttgtcagaacggc

SEQ ID NO: 10967 - DNA, 17 bp, Artificial Sequence
  Synthetic Polynucleotide
tctgtttaattggggcc

SEQ ID NO: 10968 - DNA, 18 bp, Artificial Sequence
  Synthetic Polynucleotide
aagacataaggaagaggg

SEQ ID NO: 10969 - DNA, 17 bp, Artificial Sequence
  Synthetic Polynucleotide
tctggggtgtaaagaat

SEQ ID NO: 10970 - DNA, 18 bp, Artificial Sequence
  Synthetic Polynucleotide
tgaagaagagtcgtgagg

SEQ ID NO: 10971 - DNA, 18 bp, Artificial Sequence
  Synthetic Polynucleotide
gcatagctagggttaggc

SEQ ID NO: 10972 - DNA, 17 bp, Artificial Sequence
  Synthetic Polynucleotide
atcagctaggtcaggtg

SEQ ID NO: 10973 - DNA, 18 bp, Artificial Sequence
  Synthetic Polynucleotide
ggaggaataggggatatg

SEQ ID NO: 10974 - DNA, 18 bp, Artificial Sequence
  Synthetic Polynucleotide
tggtacatctaatcagcc

SEQ ID NO: 10975 - DNA, 17 bp, Artificial Sequence
  Synthetic Polynucleotide
aaaattgcgggtggtag

SEQ ID NO: 10976 - DNA, 18 bp, Artificial Sequence
  Synthetic Polynucleotide
cagctagtaatttgggta

SEQ ID NO: 10977 - DNA, 17 bp, Artificial Sequence
  Synthetic Polynucleotide
cataggaggagcggacg

SEQ ID NO: 10978 - DNA, 18 bp, Artificial Sequence
  Synthetic Polynucleotide
aaatcaagcagcagcaca

SEQ ID NO: 10979 - DNA, 17 bp, Artificial Sequence
  Synthetic Polynucleotide
tggtgggagtctgttac

SEQ ID NO: 10980 - DNA, 18 bp, Artificial Sequence
  Synthetic Polynucleotide
gaagagaaggtaaggaga

SEQ ID NO: 10981 - DNA, 18 bp, Artificial Sequence
  Synthetic Polynucleotide
agagtagttacggctacg

SEQ ID NO: 10982 - DNA, 18 bp, Artificial Sequence
  Synthetic Polynucleotide
tgagtgagagtgtaggca

SEQ ID NO: 10983 - DNA, 17 bp, Artificial Sequence
  Synthetic Polynucleotide
cttgagaaggagggtca

SEQ ID NO: 10984 - DNA, 18 bp, Artificial Sequence
  Synthetic Polynucleotide
ccttgtagtgggtatctg

SEQ ID NO: 10985 - DNA, 18 bp, Artificial Sequence
  Synthetic Polynucleotide
atggggtatgagttacac

SEQ ID NO: 10986 - DNA, 18 bp, Artificial Sequence
  Synthetic Polynucleotide
aggtacttttggataggc

SEQ ID NO: 10987 - DNA, 17 bp, Artificial Sequence
  Synthetic Polynucleotide
tgtggaagggtgaagga

SEQ ID NO: 10988 - DNA, 17 bp, Artificial Sequence
  Synthetic Polynucleotide
gcaaggtgtagggttgt

SEQ ID NO: 10989 - DNA, 18 bp, Artificial Sequence
  Synthetic Polynucleotide
actgtgggaaggggaagg

SEQ ID NO: 10990 - DNA, 17 bp, Artificial Sequence
  Synthetic Polynucleotide
atgcggtttgcggttaa

SEQ ID NO: 10991 - DNA, 17 bp, Artificial Sequence
  Synthetic Polynucleotide
ccttggggagagagact

SEQ ID NO: 10992 - DNA, 17 bp, Artificial Sequence
  Synthetic Polynucleotide
atttcattggggagctg

SEQ ID NO: 10993 - DNA, 18 bp, Artificial Sequence
  Synthetic Polynucleotide
ggatgattgtcaacagct

SEQ ID NO: 10994 - DNA, 17 bp, Artificial Sequence
  Synthetic Polynucleotide
tcaggttttggtactgg

SEQ ID NO: 10995 - DNA, 18 bp, Artificial Sequence
  Synthetic Polynucleotide
caagtaggacataggaga

SEQ ID NO: 10996 - DNA, 17 bp, Artificial Sequence
  Synthetic Polynucleotide
ccatcctggtaaaggtt

SEQ ID NO: 10997 - DNA, 18 bp, Artificial Sequence
  Synthetic Polynucleotide
ggacataaaggtcaggta

SEQ ID NO: 10998 - DNA, 18 bp, Artificial Sequence
  Synthetic Polynucleotide
caaagagtgatttgaggg

SEQ ID NO: 10999 - DNA, 17 bp, Artificial Sequence
  Synthetic Polynucleotide
ctgcgggaggggagaaa

SEQ ID NO: 11000 - DNA, 18 bp, Artificial Sequence
  Synthetic Polynucleotide
caaggaaggacatttagc

SEQ ID NO: 11001 - DNA, 17 bp, Artificial Sequence
  Synthetic Polynucleotide
ggaagtgtgggaaagaa

SEQ ID NO: 11002 - DNA, 17 bp, Artificial Sequence
  Synthetic Polynucleotide
gctctattttgagccac

SEQ ID NO: 11003 - DNA, 17 bp, Artificial Sequence
  Synthetic Polynucleotide
gcacaagaagaacatga

SEQ ID NO: 11004 - DNA, 18 bp, Artificial Sequence
  Synthetic Polynucleotide
atgggaaggggtattaac

SEQ ID NO: 11005 - DNA, 18 bp, Artificial Sequence
  Synthetic Polynucleotide
aaattgggcaagtcaaat

SEQ ID NO: 11006 - DNA, 18 bp, Artificial Sequence
  Synthetic Polynucleotide
ggtttgcggttaagctag

SEQ ID NO: 11007 - DNA, 18 bp, Artificial Sequence
  Synthetic Polynucleotide
tttgaaagaaaagggtgg

SEQ ID NO: 11008 - DNA, 18 bp, Artificial Sequence
  Synthetic Polynucleotide
ctttgtgggttgtagggt

SEQ ID NO: 11009 - DNA, 18 bp, Artificial Sequence
  Synthetic Polynucleotide
cacaaaggaataggagga

SEQ ID NO: 11010 - DNA, 18 bp, Artificial Sequence
  Synthetic Polynucleotide
tcattgaggtcataaggt

SEQ ID NO: 11011 - DNA, 17 bp, Artificial Sequence
  Synthetic Polynucleotide
cgacatttagtttgggc

SEQ ID NO: 11012 - DNA, 18 bp, Artificial Sequence
  Synthetic Polynucleotide
cggtgaggaagagattgt

SEQ ID NO: 11013 - DNA, 17 bp, Artificial Sequence
  Synthetic Polynucleotide
gctagtaggattgggtg

SEQ ID NO: 11014 - DNA, 17 bp, Artificial Sequence
  Synthetic Polynucleotide
ggtttgtggttaagcct

SEQ ID NO: 11015 - DNA, 17 bp, Artificial Sequence
  Synthetic Polynucleotide
agcagaagaaatggtga

SEQ ID NO: 11016 - DNA, 18 bp, Artificial Sequence
  Synthetic Polynucleotide
gtatctgaggaggttgtc

SEQ ID NO: 11017 - DNA, 18 bp, Artificial Sequence
  Synthetic Polynucleotide
ccggggtattaatatggg

SEQ ID NO: 11018 - DNA, 17 bp, Artificial Sequence
  Synthetic Polynucleotide
ccagagttcaataggcc

SEQ ID NO: 11019 - DNA, 17 bp, Artificial Sequence
  Synthetic Polynucleotide
gtgaaggtgagactgta

SEQ ID NO: 11020 - DNA, 17 bp, Artificial Sequence
  Synthetic Polynucleotide
ttcggggtaagttcata

SEQ ID NO: 11021 - DNA, 18 bp, Artificial Sequence
  Synthetic Polynucleotide
tggtgagtgaaattaggg

SEQ ID NO: 11022 - DNA, 17 bp, Artificial Sequence
  Synthetic Polynucleotide
aattgaagggtaacgct

SEQ ID NO: 11023 - DNA, 18 bp, Artificial Sequence
  Synthetic Polynucleotide
aggggtggaggagggtac

SEQ ID NO: 11024 - DNA, 17 bp, Artificial Sequence
  Synthetic Polynucleotide
ttctgtgttagtggggc

SEQ ID NO: 11025 - DNA, 18 bp, Artificial Sequence
  Synthetic Polynucleotide
atggtattggggaaaggt

SEQ ID NO: 11026 - DNA, 17 bp, Artificial Sequence
  Synthetic Polynucleotide
ccgaagagagaactgag

SEQ ID NO: 11027 - DNA, 17 bp, Artificial Sequence
  Synthetic Polynucleotide
tcagcagaagagacaac

SEQ ID NO: 11028 - DNA, 18 bp, Artificial Sequence
  Synthetic Polynucleotide
agaaggggtactgggcac

SEQ ID NO: 11029 - DNA, 17 bp, Artificial Sequence
  Synthetic Polynucleotide
gggagagagagagagat

SEQ ID NO: 11030 - DNA, 18 bp, Artificial Sequence
  Synthetic Polynucleotide
ttaaaattaggggagggc

SEQ ID NO: 11031 - DNA, 18 bp, Artificial Sequence
  Synthetic Polynucleotide
aggatttatgataggggc

SEQ ID NO: 11032 - DNA, 18 bp, Artificial Sequence
  Synthetic Polynucleotide
gttctagggttgaaagct

SEQ ID NO: 11033 - DNA, 17 bp, Artificial Sequence
  Synthetic Polynucleotide
atggggaatgagtcagg

SEQ ID NO: 11034 - DNA, 18 bp, Artificial Sequence
  Synthetic Polynucleotide
cctggtttgtagtaggtc

SEQ ID NO: 11035 - DNA, 18 bp, Artificial Sequence
  Synthetic Polynucleotide
catgatcggttggtagaa

SEQ ID NO: 11036 - DNA, 17 bp, Artificial Sequence
  Synthetic Polynucleotide
ttatttgagcgggtgtt

SEQ ID NO: 11037 - DNA, 17 bp, Artificial Sequence
  Synthetic Polynucleotide
atctaggagcagcaagg

SEQ ID NO: 11038 - DNA, 18 bp, Artificial Sequence
  Synthetic Polynucleotide
agtgatttgagggaagga

SEQ ID NO: 11039 - DNA, 18 bp, Artificial Sequence
  Synthetic Polynucleotide
gcaaatacttagggcact

SEQ ID NO: 11040 - DNA, 18 bp, Artificial Sequence
  Synthetic Polynucleotide
aggagaaaaggggtgtat

SEQ ID NO: 11041 - DNA, 18 bp, Artificial Sequence
  Synthetic Polynucleotide
cggggttgaaatttgtta

SEQ ID NO: 11042 - DNA, 17 bp, Artificial Sequence
  Synthetic Polynucleotide
gacgagttaggggtggc

SEQ ID NO: 11043 - DNA, 18 bp, Artificial Sequence
  Synthetic Polynucleotide
gcgtaagaaaagggaaat

SEQ ID NO: 11044 - DNA, 17 bp, Artificial Sequence
  Synthetic Polynucleotide
ttggtggagggaggagc

SEQ ID NO: 11045 - DNA, 17 bp, Artificial Sequence
  Synthetic Polynucleotide
ctcggaggaagaacaag

SEQ ID NO: 11046 - DNA, 17 bp, Artificial Sequence
  Synthetic Polynucleotide
ctttcattttgggcacc

SEQ ID NO: 11047 - DNA, 18 bp, Artificial Sequence
  Synthetic Polynucleotide
aagcagaagaggagctac

SEQ ID NO: 11048 - DNA, 18 bp, Artificial Sequence
  Synthetic Polynucleotide
ctcgtttgcggaatggat

SEQ ID NO: 11049 - DNA, 18 bp, Artificial Sequence
  Synthetic Polynucleotide
gtgtagtcagagacatgg

SEQ ID NO: 11050 - DNA, 18 bp, Artificial Sequence
  Synthetic Polynucleotide
cgggaggtggggtgtttc

SEQ ID NO: 11051 - DNA, 17 bp, Artificial Sequence
  Synthetic Polynucleotide
caggtgtggataaagga

SEQ ID NO: 11052 - DNA, 17 bp, Artificial Sequence
  Synthetic Polynucleotide
tagggtaatggtctagg

SEQ ID NO: 11053 - DNA, 18 bp, Artificial Sequence
  Synthetic Polynucleotide
agaggggaattttaggtg

SEQ ID NO: 11054 - DNA, 17 bp, Artificial Sequence
  Synthetic Polynucleotide
caattcgtgttggttcc

SEQ ID NO: 11055 - DNA, 18 bp, Artificial Sequence
  Synthetic Polynucleotide
tgaggggaaagaaaagtc

SEQ ID NO: 11056 - DNA, 17 bp, Artificial Sequence
  Synthetic Polynucleotide
gactgtcgggtatggat

SEQ ID NO: 11057 - DNA, 18 bp, Artificial Sequence
  Synthetic Polynucleotide
tggagaaattcgtgaagg

SEQ ID NO: 11058 - DNA, 18 bp, Artificial Sequence
  Synthetic Polynucleotide
cacttgggagaatgagca

SEQ ID NO: 11059 - DNA, 17 bp, Artificial Sequence
  Synthetic Polynucleotide
ggcataaagtgggaagg

SEQ ID NO: 11060 - DNA, 17 bp, Artificial Sequence
  Synthetic Polynucleotide
ctttgagagcagcacaa

SEQ ID NO: 11061 - DNA, 18 bp, Artificial Sequence
  Synthetic Polynucleotide
tttgtttaggtcaggtgc

SEQ ID NO: 11062 - DNA, 18 bp, Artificial Sequence
  Synthetic Polynucleotide
aacactgggtaatggagg

SEQ ID NO: 11063 - DNA, 17 bp, Artificial Sequence
  Synthetic Polynucleotide
tagtcaggtaaggacac

SEQ ID NO: 11064 - DNA, 17 bp, Artificial Sequence
  Synthetic Polynucleotide
ctaggggaaggagtaca

SEQ ID NO: 11065 - DNA, 17 bp, Artificial Sequence
  Synthetic Polynucleotide
ctaggtcgagcgggaaa

SEQ ID NO: 11066 - DNA, 17 bp, Artificial Sequence
  Synthetic Polynucleotide
gaagaggtaagaggggc

SEQ ID NO: 11067 - DNA, 18 bp, Artificial Sequence
  Synthetic Polynucleotide
tcattttcggtttggtac

SEQ ID NO: 11068 - DNA, 17 bp, Artificial Sequence
  Synthetic Polynucleotide
gggaggtgaagaaacaa

SEQ ID NO: 11069 - DNA, 18 bp, Artificial Sequence
  Synthetic Polynucleotide
gtgtaggttgggaattct

SEQ ID NO: 11070 - DNA, 18 bp, Artificial Sequence
  Synthetic Polynucleotide
acctgatccagtgagatg

SEQ ID NO: 11071 - DNA, 18 bp, Artificial Sequence
  Synthetic Polynucleotide
tgaggcacttcaacatat

SEQ ID NO: 11072 - DNA, 17 bp, Artificial Sequence
  Synthetic Polynucleotide
gtactcgtgatccttgc

SEQ ID NO: 11073 - DNA, 18 bp, Artificial Sequence
  Synthetic Polynucleotide
tatcagtcaccagcgtct

SEQ ID NO: 11074 - DNA, 17 bp, Artificial Sequence
  Synthetic Polynucleotide
ggagtcggttttctgtt

SEQ ID NO: 11075 - DNA, 18 bp, Artificial Sequence
  Synthetic Polynucleotide
cgactttggattgtcttc

SEQ ID NO: 11076 - DNA, 18 bp, Artificial Sequence
  Synthetic Polynucleotide
gaatcgtgggaagaaagg

SEQ ID NO: 11077 - DNA, 18 bp, Artificial Sequence
  Synthetic Polynucleotide
agattcagaccagaacac

SEQ ID NO: 11078 - DNA, 18 bp, Artificial Sequence
  Synthetic Polynucleotide
gcatcctgctcatcatga

SEQ ID NO: 11079 - DNA, 18 bp, Artificial Sequence
  Synthetic Polynucleotide
gatgtggacaagatggcc

SEQ ID NO: 11080 - DNA, 17 bp, Artificial Sequence
  Synthetic Polynucleotide
tcaacagtctcctctgc

SEQ ID NO: 11081 - DNA, 18 bp, Artificial Sequence
  Synthetic Polynucleotide
aactaacacccctccttt

SEQ ID NO: 11082 - DNA, 17 bp, Artificial Sequence
  Synthetic Polynucleotide
acctcatcatacaaggc

SEQ ID NO: 11083 - DNA, 17 bp, Artificial Sequence
  Synthetic Polynucleotide
gagtctaagagatgggc

SEQ ID NO: 11084 - DNA, 18 bp, Artificial Sequence
  Synthetic Polynucleotide
ctttggattccttcgttt

SEQ ID NO: 11085 - DNA, 17 bp, Artificial Sequence
  Synthetic Polynucleotide
gacactctccagctagt

SEQ ID NO: 11086 - DNA, 17 bp, Artificial Sequence
  Synthetic Polynucleotide
cacactctccgtaccag

SEQ ID NO: 11087 - DNA, 17 bp, Artificial Sequence
  Synthetic Polynucleotide
tcgttgtcactcctgcg

SEQ ID NO: 11088 - DNA, 17 bp, Artificial Sequence
  Synthetic Polynucleotide
gcaccaaatctttgctc

SEQ ID NO: 11089 - DNA, 18 bp, Artificial Sequence
  Synthetic Polynucleotide
gagttctttgggaaaggc

SEQ ID NO: 11090 - DNA, 17 bp, Artificial Sequence
  Synthetic Polynucleotide
cctgttaacccttgcat

SEQ ID NO: 11091 - DNA, 18 bp, Artificial Sequence
  Synthetic Polynucleotide
gcagacccagcatattca

SEQ ID NO: 11092 - DNA, 18 bp, Artificial Sequence
  Synthetic Polynucleotide
gattgagtcggttcgttc

SEQ ID NO: 11093 - DNA, 17 bp, Artificial Sequence
  Synthetic Polynucleotide
ggacggcattcctcaat

SEQ ID NO: 11094 - DNA, 17 bp, Artificial Sequence
  Synthetic Polynucleotide
catgggaacctccttta

SEQ ID NO: 11095 - DNA, 17 bp, Artificial Sequence
  Synthetic Polynucleotide
ggattggactttgaccc

SEQ ID NO: 11096 - DNA, 17 bp, Artificial Sequence
  Synthetic Polynucleotide
ccgagagcgtttgcgtc

SEQ ID NO: 11097 - DNA, 17 bp, Artificial Sequence
  Synthetic Polynucleotide
atgtacaccgcaataga

SEQ ID NO: 11098 - DNA, 18 bp, Artificial Sequence
  Synthetic Polynucleotide
tcggaacatttcttgatt

SEQ ID NO: 11099 - DNA, 17 bp, Artificial Sequence
  Synthetic Polynucleotide
tgtcgggattggaagct

SEQ ID NO: 11100 - DNA, 17 bp, Artificial Sequence
  Synthetic Polynucleotide
ggaaccccttcatgaca

SEQ ID NO: 11101 - DNA, 18 bp, Artificial Sequence
  Synthetic Polynucleotide
tcagcacaaaagactaca

SEQ ID NO: 11102 - DNA, 17 bp, Artificial Sequence
  Synthetic Polynucleotide
cagtggaccattctaga

SEQ ID NO: 11103 - DNA, 17 bp, Artificial Sequence
  Synthetic Polynucleotide
aaactaacacccctcct

SEQ ID NO: 11104 - DNA, 18 bp, Artificial Sequence
  Synthetic Polynucleotide
ttgcactctgtagattgt

SEQ ID NO: 11105 - DNA, 17 bp, Artificial Sequence
  Synthetic Polynucleotide
cctgccaacaatttgcc

SEQ ID NO: 11106 - DNA, 18 bp, Artificial Sequence
  Synthetic Polynucleotide
gctcgataatctccaagc

SEQ ID NO: 11107 - DNA, 18 bp, Artificial Sequence
  Synthetic Polynucleotide
tcatggatttcatccggt

SEQ ID NO: 11108 - DNA, 18 bp, Artificial Sequence
  Synthetic Polynucleotide
aaaaccagtcatctgcat

SEQ ID NO: 11109 - DNA, 18 bp, Artificial Sequence
  Synthetic Polynucleotide
tcatttctccaggctttt

SEQ ID NO: 11110 - DNA, 18 bp, Artificial Sequence
  Synthetic Polynucleotide
ttgttgttcaaaccatga

SEQ ID NO: 11111 - DNA, 18 bp, Artificial Sequence
  Synthetic Polynucleotide
aacattctttgcagatga

SEQ ID NO: 11112 - DNA, 17 bp, Artificial Sequence
  Synthetic Polynucleotide
ctggattctgtcccttt

SEQ ID NO: 11113 - DNA, 18 bp, Artificial Sequence
  Synthetic Polynucleotide
aaatgaaagaagacgcta

SEQ ID NO: 11114 - DNA, 18 bp, Artificial Sequence
  Synthetic Polynucleotide
acacgacgctccgcaagt

SEQ ID NO: 11115 - DNA, 18 bp, Artificial Sequence
  Synthetic Polynucleotide
agttgttacacgctggtt

SEQ ID NO: 11116 - DNA, 17 bp, Artificial Sequence
  Synthetic Polynucleotide
ccgttaggatcatgcca

SEQ ID NO: 11117 - DNA, 17 bp, Artificial Sequence
  Synthetic Polynucleotide
tgtgatgatgggaccag

SEQ ID NO: 11118 - DNA, 18 bp, Artificial Sequence
  Synthetic Polynucleotide
tcgacaagtcctgcccaa

SEQ ID NO: 11119 - DNA, 18 bp, Artificial Sequence
  Synthetic Polynucleotide
tacaggatgatagttggg

SEQ ID NO: 11120 - DNA, 18 bp, Artificial Sequence
  Synthetic Polynucleotide
ccgaaagcacctttgctg

SEQ ID NO: 11121 - DNA, 18 bp, Artificial Sequence
  Synthetic Polynucleotide
ccagtacgctgttcatac

SEQ ID NO: 11122 - DNA, 17 bp, Artificial Sequence
  Synthetic Polynucleotide
gttaaaaccaccatcga

SEQ ID NO: 11123 - DNA, 17 bp, Artificial Sequence
  Synthetic Polynucleotide
acccgtatacttccctg

SEQ ID NO: 11124 - DNA, 17 bp, Artificial Sequence
  Synthetic Polynucleotide
tcccgaatagttcacat

SEQ ID NO: 11125 - DNA, 17 bp, Artificial Sequence
  Synthetic Polynucleotide
tgtgcccaagtatttcg

SEQ ID NO: 11126 - DNA, 18 bp, Artificial Sequence
  Synthetic Polynucleotide
ttgcaccatgtagatcat

SEQ ID NO: 11127 - DNA, 18 bp, Artificial Sequence
  Synthetic Polynucleotide
tatgtccgcaattagtta

SEQ ID NO: 11128 - DNA, 18 bp, Artificial Sequence
  Synthetic Polynucleotide
cgcccaagctaagaaact

SEQ ID NO: 11129 - DNA, 18 bp, Artificial Sequence
  Synthetic Polynucleotide
tcgtatctttatccagcc

SEQ ID NO: 11130 - DNA, 18 bp, Artificial Sequence
  Synthetic Polynucleotide
tcatgatgaaaccattcc

SEQ ID NO: 11131 - DNA, 18 bp, Artificial Sequence
  Synthetic Polynucleotide
cgctcgaactgatgaaaa

SEQ ID NO: 11132 - DNA, 17 bp, Artificial Sequence
  Synthetic Polynucleotide
ttttccgaaaagcccag

SEQ ID NO: 11133 - DNA, 17 bp, Artificial Sequence
  Synthetic Polynucleotide
ggttgaaaccctaaagc

SEQ ID NO: 11134 - DNA, 17 bp, Artificial Sequence
  Synthetic Polynucleotide
acacccaaactatccac

SEQ ID NO: 11135 - DNA, 18 bp, Artificial Sequence
  Synthetic Polynucleotide
actaaaaccgcaaatgta

SEQ ID NO: 11136 - DNA, 17 bp, Artificial Sequence
  Synthetic Polynucleotide
ccttccccacaaaactc

SEQ ID NO: 11137 - DNA, 17 bp, Artificial Sequence
  Synthetic Polynucleotide
ggtcaaaccaccctttt

SEQ ID NO: 11138 - DNA, 17 bp, Artificial Sequence
  Synthetic Polynucleotide
tccaaatcaatgtcagc

SEQ ID NO: 11139 - DNA, 18 bp, Artificial Sequence
  Synthetic Polynucleotide
taacagatgaaccatacg

SEQ ID NO: 11140 - DNA, 18 bp, Artificial Sequence
  Synthetic Polynucleotide
atctttccccttccgtac

SEQ ID NO: 11141 - DNA, 18 bp, Artificial Sequence
  Synthetic Polynucleotide
gaaccaataccgtcagga

SEQ ID NO: 11142 - DNA, 18 bp, Artificial Sequence
  Synthetic Polynucleotide
agatagattccctcgtcg

SEQ ID NO: 11143 - DNA, 18 bp, Artificial Sequence
  Synthetic Polynucleotide
acaccccgaatgaagtct

SEQ ID NO: 11144 - DNA, 18 bp, Artificial Sequence
  Synthetic Polynucleotide
ctgcaaagagatgatcga

SEQ ID NO: 11145 - DNA, 18 bp, Artificial Sequence
  Synthetic Polynucleotide
tcgccccaagaagtactg

SEQ ID NO: 11146 - DNA, 17 bp, Artificial Sequence
  Synthetic Polynucleotide
ggaatgagcaaatcgcg

SEQ ID NO: 11147 - DNA, 18 bp, Artificial Sequence
  Synthetic Polynucleotide
tccacgtttcgtaaaata

SEQ ID NO: 11148 - DNA, 17 bp, Artificial Sequence
  Synthetic Polynucleotide
agaaaggaaccaccatg

SEQ ID NO: 11149 - DNA, 17 bp, Artificial Sequence
  Synthetic Polynucleotide
caggtcttcccacccgg

SEQ ID NO: 11150 - DNA, 17 bp, Artificial Sequence
  Synthetic Polynucleotide
caaacttatcgccccac

SEQ ID NO: 11151 - DNA, 18 bp, Artificial Sequence
  Synthetic Polynucleotide
ggcaaatgaagctagaag

SEQ ID NO: 11152 - DNA, 18 bp, Artificial Sequence
  Synthetic Polynucleotide
acagatactaccgcattg

SEQ ID NO: 11153 - DNA, 17 bp, Artificial Sequence
  Synthetic Polynucleotide
gtgccactactaacccc

SEQ ID NO: 11154 - DNA, 17 bp, Artificial Sequence
  Synthetic Polynucleotide
gaatcgccaccgccctc

SEQ ID NO: 11155 - DNA, 17 bp, Artificial Sequence
  Synthetic Polynucleotide
cgaccgtcacaccgacc

SEQ ID NO: 11156 - DNA, 17 bp, Artificial Sequence
  Synthetic Polynucleotide
aacccgcccatttcctc

SEQ ID NO: 11157 - DNA, 17 bp, Artificial Sequence
  Synthetic Polynucleotide
agcccgaacaagatcga

SEQ ID NO: 11158 - DNA, 17 bp, Artificial Sequence
  Synthetic Polynucleotide
cgtcacgcttgctaaag

SEQ ID NO: 11159 - DNA, 18 bp, Artificial Sequence
  Synthetic Polynucleotide
acctgaaaggcgattgtg

SEQ ID NO: 11160 - DNA, 17 bp, Artificial Sequence
  Synthetic Polynucleotide
ccacgtttatcactccc

SEQ ID NO: 11161 - DNA, 18 bp, Artificial Sequence
  Synthetic Polynucleotide
gtcgggaaagtgaagacc

SEQ ID NO: 11162 - DNA, 17 bp, Artificial Sequence
  Synthetic Polynucleotide
acagtgccattcagaat

SEQ ID NO: 11163 - DNA, 18 bp, Artificial Sequence
  Synthetic Polynucleotide
agacaccccgtatggctt

SEQ ID NO: 11164 - DNA, 18 bp, Artificial Sequence
  Synthetic Polynucleotide
taccccttatcccacagc

SEQ ID NO: 11165 - DNA, 18 bp, Artificial Sequence
  Synthetic Polynucleotide
caacatgctgctcaattt

SEQ ID NO: 11166 - DNA, 17 bp, Artificial Sequence
  Synthetic Polynucleotide
ggaccttcggaaccttg

SEQ ID NO: 11167 - DNA, 18 bp, Artificial Sequence
  Synthetic Polynucleotide
tcctagaaggtgatgttt

SEQ ID NO: 11168 - DNA, 18 bp, Artificial Sequence
  Synthetic Polynucleotide
gacctcgtaagagacgac

SEQ ID NO: 11169 - DNA, 17 bp, Artificial Sequence
  Synthetic Polynucleotide
cctggctcaacaacctc

SEQ ID NO: 11170 - DNA, 18 bp, Artificial Sequence
  Synthetic Polynucleotide
catagcctctctcagttc

SEQ ID NO: 11171 - DNA, 18 bp, Artificial Sequence
  Synthetic Polynucleotide
tcactccccgagtaccgc

SEQ ID NO: 11172 - DNA, 17 bp, Artificial Sequence
  Synthetic Polynucleotide
ggttggacgtagaacgc

SEQ ID NO: 11173 - DNA, 17 bp, Artificial Sequence
  Synthetic Polynucleotide
tggctcaacaatctcgc

SEQ ID NO: 11174 - DNA, 17 bp, Artificial Sequence
  Synthetic Polynucleotide
cgctggttgagcccaac

SEQ ID NO: 11175 - DNA, 17 bp, Artificial Sequence
  Synthetic Polynucleotide
ggggagagggtctcttt

SEQ ID NO: 11176 - DNA, 17 bp, Artificial Sequence
  Synthetic Polynucleotide
gtgagctgccaccaatg

SEQ ID NO: 11177 - DNA, 17 bp, Artificial Sequence
  Synthetic Polynucleotide
ggcgaggtgtgggtcac

SEQ ID NO: 11178 - DNA, 18 bp, Artificial Sequence
  Synthetic Polynucleotide
agtgcgtacctatttagg

SEQ ID NO: 11179 - DNA, 18 bp, Artificial Sequence
  Synthetic Polynucleotide
tggatgaacatggaagtg

SEQ ID NO: 11180 - DNA, 17 bp, Artificial Sequence
  Synthetic Polynucleotide
ccctgtcatctgatcgc

SEQ ID NO: 11181 - DNA, 17 bp, Artificial Sequence
  Synthetic Polynucleotide
cgcgagggtttcttgag

SEQ ID NO: 11182 - DNA, 17 bp, Artificial Sequence
  Synthetic Polynucleotide
aaacattctacgagccg

SEQ ID NO: 11183 - DNA, 17 bp, Artificial Sequence
  Synthetic Polynucleotide
tgccagagcattttcgc

SEQ ID NO: 11184 - DNA, 17 bp, Artificial Sequence
  Synthetic Polynucleotide
aggggagtacacggggc

SEQ ID NO: 11185 - DNA, 17 bp, Artificial Sequence
  Synthetic Polynucleotide
cgcgggtgcatatattt

SEQ ID NO: 11186 - DNA, 18 bp, Artificial Sequence
  Synthetic Polynucleotide
gaagcacgttaacacgat

SEQ ID NO: 11187 - DNA, 17 bp, Artificial Sequence
  Synthetic Polynucleotide
ccgtcaggtaaggtagt

SEQ ID NO: 11188 - DNA, 17 bp, Artificial Sequence
  Synthetic Polynucleotide
cgcgagggattcttgtg

SEQ ID NO: 11189 - DNA, 18 bp, Artificial Sequence
  Synthetic Polynucleotide
cgccactgtagggtagtt

SEQ ID NO: 11190 - DNA, 17 bp, Artificial Sequence
  Synthetic Polynucleotide
gtgccgattatggatcg

SEQ ID NO: 11191 - DNA, 18 bp, Artificial Sequence
  Synthetic Polynucleotide
cgtagggatgagtacctt

SEQ ID NO: 11192 - DNA, 18 bp, Artificial Sequence
  Synthetic Polynucleotide
ccacatggatctgtatct

SEQ ID NO: 11193 - DNA, 18 bp, Artificial Sequence
  Synthetic Polynucleotide
tgcctatgtctaggatcg

SEQ ID NO: 11194 - DNA, 18 bp, Artificial Sequence
  Synthetic Polynucleotide
cagtttgaggtagaagcc

SEQ ID NO: 11195 - DNA, 17 bp, Artificial Sequence
  Synthetic Polynucleotide
gggagagggtatccttt

SEQ ID NO: 11196 - DNA, 17 bp, Artificial Sequence
  Synthetic Polynucleotide
tgaatacattctgcggg

SEQ ID NO: 11197 - DNA, 17 bp, Artificial Sequence
  Synthetic Polynucleotide
tcagagctttgcaacgg

SEQ ID NO: 11198 - DNA, 17 bp, Artificial Sequence
  Synthetic Polynucleotide
tctggaggacacatagt

SEQ ID NO: 11199 - DNA, 17 bp, Artificial Sequence
  Synthetic Polynucleotide
tgcatgaagatcgagaa

SEQ ID NO: 11200 - DNA, 18 bp, Artificial Sequence
  Synthetic Polynucleotide
gggtttgtccgtcttgta

SEQ ID NO: 11201 - DNA, 17 bp, Artificial Sequence
  Synthetic Polynucleotide
ttcatctttggaccgat

SEQ ID NO: 11202 - DNA, 18 bp, Artificial Sequence
  Synthetic Polynucleotide
cattctttgctgcgggtt

SEQ ID NO: 11203 - DNA, 17 bp, Artificial Sequence
  Synthetic Polynucleotide
ctgaaagtcattgccgg

SEQ ID NO: 11204 - DNA, 18 bp, Artificial Sequence
  Synthetic Polynucleotide
cgcctgccattcttctaa

SEQ ID NO: 11205 - DNA, 17 bp, Artificial Sequence
  Synthetic Polynucleotide
gcattgattgccattgt

SEQ ID NO: 11206 - DNA, 17 bp, Artificial Sequence
  Synthetic Polynucleotide
atatgcagactctccac

SEQ ID NO: 11207 - DNA, 17 bp, Artificial Sequence
  Synthetic Polynucleotide
ggttgcccatcacaggc

SEQ ID NO: 11208 - DNA, 18 bp, Artificial Sequence
  Synthetic Polynucleotide
agagatagcatcattggc

SEQ ID NO: 11209 - DNA, 18 bp, Artificial Sequence
  Synthetic Polynucleotide
cagatttacaacgtgcca

SEQ ID NO: 11210 - DNA, 17 bp, Artificial Sequence
  Synthetic Polynucleotide
tcgaaatgtgttgagtc

SEQ ID NO: 11211 - DNA, 17 bp, Artificial Sequence
  Synthetic Polynucleotide
taccgtgacatacaact

SEQ ID NO: 11212 - DNA, 18 bp, Artificial Sequence
  Synthetic Polynucleotide
gttttcatgccccagaga

SEQ ID NO: 11213 - DNA, 18 bp, Artificial Sequence
  Synthetic Polynucleotide
ctccacaatcccgctact

SEQ ID NO: 11214 - DNA, 17 bp, Artificial Sequence
  Synthetic Polynucleotide
accattgcccattccac

SEQ ID NO: 11215 - DNA, 18 bp, Artificial Sequence
  Synthetic Polynucleotide
tcgtagacagccacatca

SEQ ID NO: 11216 - DNA, 18 bp, Artificial Sequence
  Synthetic Polynucleotide
atccaaatcgactccatc

SEQ ID NO: 11217 - DNA, 18 bp, Artificial Sequence
  Synthetic Polynucleotide
tgaaaagtgatcctgctc

SEQ ID NO: 11218 - DNA, 18 bp, Artificial Sequence
  Synthetic Polynucleotide
tctgccagactttcatcg

SEQ ID NO: 11219 - DNA, 17 bp, Artificial Sequence
  Synthetic Polynucleotide
attgcagaggagccagt

SEQ ID NO: 11220 - DNA, 18 bp, Artificial Sequence
  Synthetic Polynucleotide
gcagcccacccatcgttc

SEQ ID NO: 11221 - DNA, 18 bp, Artificial Sequence
  Synthetic Polynucleotide
cacgacagtagtaagaca

SEQ ID NO: 11222 - DNA, 18 bp, Artificial Sequence
  Synthetic Polynucleotide
ttaccatagcccattgcg

SEQ ID NO: 11223 - DNA, 18 bp, Artificial Sequence
  Synthetic Polynucleotide
aaaccgcaatcttgagca

SEQ ID NO: 11224 - DNA, 17 bp, Artificial Sequence
  Synthetic Polynucleotide
caagtaacgtcccactt

SEQ ID NO: 11225 - DNA, 18 bp, Artificial Sequence
  Synthetic Polynucleotide
gcacaattcttcactcgt

SEQ ID NO: 11226 - DNA, 17 bp, Artificial Sequence
  Synthetic Polynucleotide
gtcagtgccttggaagg

SEQ ID NO: 11227 - DNA, 18 bp, Artificial Sequence
  Synthetic Polynucleotide
tccgattaaacgtaacca

SEQ ID NO: 11228 - DNA, 17 bp, Artificial Sequence
  Synthetic Polynucleotide
agagacagcccgccttc

SEQ ID NO: 11229 - DNA, 17 bp, Artificial Sequence
  Synthetic Polynucleotide
tgcgtgcttatatgtga

SEQ ID NO: 11230 - DNA, 17 bp, Artificial Sequence
  Synthetic Polynucleotide
gtttccgcatcaccgtc

SEQ ID NO: 11231 - DNA, 18 bp, Artificial Sequence
  Synthetic Polynucleotide
gccctccagtttgaacat

SEQ ID NO: 11232 - DNA, 18 bp, Artificial Sequence
  Synthetic Polynucleotide
gtaccgcttgacattgtc

SEQ ID NO: 11233 - DNA, 18 bp, Artificial Sequence
  Synthetic Polynucleotide
cttcgaccagtacagatt

SEQ ID NO: 11234 - DNA, 17 bp, Artificial Sequence
  Synthetic Polynucleotide
aacaacccaattacccc

SEQ ID NO: 11235 - DNA, 17 bp, Artificial Sequence
  Synthetic Polynucleotide
aaactcccagtgttgaa

SEQ ID NO: 11236 - DNA, 18 bp, Artificial Sequence
  Synthetic Polynucleotide
cacaatcatccccattgt

SEQ ID NO: 11237 - DNA, 17 bp, Artificial Sequence
  Synthetic Polynucleotide
gatgccttgaagttcga

SEQ ID NO: 11238 - DNA, 18 bp, Artificial Sequence
  Synthetic Polynucleotide
gacccatccctcgccatc

SEQ ID NO: 11239 - DNA, 17 bp, Artificial Sequence
  Synthetic Polynucleotide
agagattcgatcagcac

SEQ ID NO: 11240 - DNA, 17 bp, Artificial Sequence
  Synthetic Polynucleotide
cctcacccaactcgccc

SEQ ID NO: 11241 - DNA, 17 bp, Artificial Sequence
  Synthetic Polynucleotide
gctggacaatccccagt

SEQ ID NO: 11242 - DNA, 18 bp, Artificial Sequence
  Synthetic Polynucleotide
tcaggtacataccccttt

SEQ ID NO: 11243 - DNA, 17 bp, Artificial Sequence
  Synthetic Polynucleotide
tgctagtctttccccgt

SEQ ID NO: 11244 - DNA, 18 bp, Artificial Sequence
  Synthetic Polynucleotide
gaaaacctcagataaccg

SEQ ID NO: 11245 - DNA, 18 bp, Artificial Sequence
  Synthetic Polynucleotide
ggttgccttcttgtgttc

SEQ ID NO: 11246 - DNA, 17 bp, Artificial Sequence
  Synthetic Polynucleotide
aatcgttccactagtcc

SEQ ID NO: 11247 - DNA, 18 bp, Artificial Sequence
  Synthetic Polynucleotide
aaaaccccgtaaattgta

SEQ ID NO: 11248 - DNA, 17 bp, Artificial Sequence
  Synthetic Polynucleotide
cgcagtcatccccattg

SEQ ID NO: 11249 - DNA, 17 bp, Artificial Sequence
  Synthetic Polynucleotide
tacctatcctgtttcgg

SEQ ID NO: 11250 - DNA, 18 bp, Artificial Sequence
  Synthetic Polynucleotide
gtaaatcgtacccgtgtg

SEQ ID NO: 11251 - DNA, 18 bp, Artificial Sequence
  Synthetic Polynucleotide
gccatctccgctaagaat

SEQ ID NO: 11252 - DNA, 18 bp, Artificial Sequence
  Synthetic Polynucleotide
aatgccttgactaccact

SEQ ID NO: 11253 - DNA, 18 bp, Artificial Sequence
  Synthetic Polynucleotide
aaatactccaacccttgc

SEQ ID NO: 11254 - DNA, 18 bp, Artificial Sequence
  Synthetic Polynucleotide
acaagtgttcgtgattcg

SEQ ID NO: 11255 - DNA, 18 bp, Artificial Sequence
  Synthetic Polynucleotide
cgttgccgtaaccgtcag

SEQ ID NO: 11256 - DNA, 17 bp, Artificial Sequence
  Synthetic Polynucleotide
cggaccaccccaaatct

SEQ ID NO: 11257 - DNA, 17 bp, Artificial Sequence
  Synthetic Polynucleotide
tagcattgtacaccatg

SEQ ID NO: 11258 - DNA, 17 bp, Artificial Sequence
  Synthetic Polynucleotide
ccacctccgtaacctcc

SEQ ID NO: 11259 - DNA, 18 bp, Artificial Sequence
  Synthetic Polynucleotide
gtacagcccctttcaggt

SEQ ID NO: 11260 - DNA, 18 bp, Artificial Sequence
  Synthetic Polynucleotide
ggaattctcccctatgag

SEQ ID NO: 11261 - DNA, 18 bp, Artificial Sequence
  Synthetic Polynucleotide
ttagttcgttcgtagtgg

SEQ ID NO: 11262 - DNA, 18 bp, Artificial Sequence
  Synthetic Polynucleotide
caagccacatcttgtgtt

SEQ ID NO: 11263 - DNA, 18 bp, Artificial Sequence
  Synthetic Polynucleotide
acacaccaaaacccaccc

SEQ ID NO: 11264 - DNA, 18 bp, Artificial Sequence
  Synthetic Polynucleotide
acacaatcatccccattg

SEQ ID NO: 11265 - DNA, 18 bp, Artificial Sequence
  Synthetic Polynucleotide
tgatttctccccgtgatc

SEQ ID NO: 11266 - DNA, 18 bp, Artificial Sequence
  Synthetic Polynucleotide
tcccggtcagtcatactt

SEQ ID NO: 11267 - DNA, 18 bp, Artificial Sequence
  Synthetic Polynucleotide
gtacgtgctgtaatctcc

SEQ ID NO: 11268 - DNA, 17 bp, Artificial Sequence
  Synthetic Polynucleotide
ggcgtcaagtgggcaag

SEQ ID NO: 11269 - DNA, 18 bp, Artificial Sequence
  Synthetic Polynucleotide
ggtgtcagcgttgtcagc

SEQ ID NO: 11270 - DNA, 18 bp, Artificial Sequence
  Synthetic Polynucleotide
ttttcggtgtgatagcaa

SEQ ID NO: 11271 - DNA, 18 bp, Artificial Sequence
  Synthetic Polynucleotide
ctccaacaataaagcaga

SEQ ID NO: 11272 - DNA, 18 bp, Artificial Sequence
  Synthetic Polynucleotide
gttgtaggatgtagctgt

SEQ ID NO: 11273 - DNA, 17 bp, Artificial Sequence
  Synthetic Polynucleotide
ttcctcacgatccacag

SEQ ID NO: 11274 - DNA, 17 bp, Artificial Sequence
  Synthetic Polynucleotide
tcagtccaatcggagtt

SEQ ID NO: 11275 - DNA, 17 bp, Artificial Sequence
  Synthetic Polynucleotide
cccagtccaagccaatg

SEQ ID NO: 11276 - DNA, 18 bp, Artificial Sequence
  Synthetic Polynucleotide
atcaggtaaggaagctgt

SEQ ID NO: 11277 - DNA, 17 bp, Artificial Sequence
  Synthetic Polynucleotide
aactagcaaccttcggc

SEQ ID NO: 11278 - DNA, 18 bp, Artificial Sequence
  Synthetic Polynucleotide
tggcatgaatctagaaga

SEQ ID NO: 11279 - DNA, 17 bp, Artificial Sequence
  Synthetic Polynucleotide
gggatggtacgaccttc

SEQ ID NO: 11280 - DNA, 18 bp, Artificial Sequence
  Synthetic Polynucleotide
acacccaacagtggtctc

SEQ ID NO: 11281 - DNA, 17 bp, Artificial Sequence
  Synthetic Polynucleotide
ggcgtttcttgtacacg

SEQ ID NO: 11282 - DNA, 17 bp, Artificial Sequence
  Synthetic Polynucleotide
tagagtagtcctgcatt

SEQ ID NO: 11283 - DNA, 18 bp, Artificial Sequence
  Synthetic Polynucleotide
agccagacaaagataacc

SEQ ID NO: 11284 - DNA, 18 bp, Artificial Sequence
  Synthetic Polynucleotide
tataagactcctcaccat

SEQ ID NO: 11285 - DNA, 17 bp, Artificial Sequence
  Synthetic Polynucleotide
agggatggttttacgac

SEQ ID NO: 11286 - DNA, 17 bp, Artificial Sequence
  Synthetic Polynucleotide
ccggttttgaaagcctt

SEQ ID NO: 11287 - DNA, 17 bp, Artificial Sequence
  Synthetic Polynucleotide
aatgagacaggcaatgt

SEQ ID NO: 11288 - DNA, 18 bp, Artificial Sequence
  Synthetic Polynucleotide
cctggttcccaatccagt

SEQ ID NO: 11289 - DNA, 18 bp, Artificial Sequence
  Synthetic Polynucleotide
tcctgaaataagaggcac

SEQ ID NO: 11290 - DNA, 17 bp, Artificial Sequence
  Synthetic Polynucleotide
gctcgtttcgatattgg

SEQ ID NO: 11291 - DNA, 17 bp, Artificial Sequence
  Synthetic Polynucleotide
caagcggttttctccct

SEQ ID NO: 11292 - DNA, 17 bp, Artificial Sequence
  Synthetic Polynucleotide
atcaactttcgtcgcac

SEQ ID NO: 11293 - DNA, 17 bp, Artificial Sequence
  Synthetic Polynucleotide
ccacataaacagtgtgc

SEQ ID NO: 11294 - DNA, 17 bp, Artificial Sequence
  Synthetic Polynucleotide
ggaccctaagtacaggt

SEQ ID NO: 11295 - DNA, 18 bp, Artificial Sequence
  Synthetic Polynucleotide
taacgtcggaatgtcatt

SEQ ID NO: 11296 - DNA, 18 bp, Artificial Sequence
  Synthetic Polynucleotide
aatccataacggtaggtg

SEQ ID NO: 11297 - DNA, 17 bp, Artificial Sequence
  Synthetic Polynucleotide
ttgatagaacaggcgga

SEQ ID NO: 11298 - DNA, 17 bp, Artificial Sequence
  Synthetic Polynucleotide
acccagaagtacggagc

SEQ ID NO: 11299 - DNA, 18 bp, Artificial Sequence
  Synthetic Polynucleotide
tgttttcactagcagtca

SEQ ID NO: 11300 - DNA, 18 bp, Artificial Sequence
  Synthetic Polynucleotide
taagtcataaaaggtggg

SEQ ID NO: 11301 - DNA, 18 bp, Artificial Sequence
  Synthetic Polynucleotide
cgacttcacaaacacaac

SEQ ID NO: 11302 - DNA, 18 bp, Artificial Sequence
  Synthetic Polynucleotide
agttgtcatagtccagca

SEQ ID NO: 11303 - DNA, 18 bp, Artificial Sequence
  Synthetic Polynucleotide
ccccaagcgtcaagctcg

SEQ ID NO: 11304 - DNA, 18 bp, Artificial Sequence
  Synthetic Polynucleotide
gggcgtcagtaagtaagt

SEQ ID NO: 11305 - DNA, 17 bp, Artificial Sequence
  Synthetic Polynucleotide
tcacatagatgagtcgg

SEQ ID NO: 11306 - DNA, 18 bp, Artificial Sequence
  Synthetic Polynucleotide
ccgatcaacaatctcccc

SEQ ID NO: 11307 - DNA, 17 bp, Artificial Sequence
  Synthetic Polynucleotide
gcggagcataatgaatc

SEQ ID NO: 11308 - DNA, 18 bp, Artificial Sequence
  Synthetic Polynucleotide
agatttctcagtgtcagg

SEQ ID NO: 11309 - DNA, 18 bp, Artificial Sequence
  Synthetic Polynucleotide
actctcttgtatcctcgc

SEQ ID NO: 11310 - DNA, 17 bp, Artificial Sequence
  Synthetic Polynucleotide
gaactcggtggttacgc

SEQ ID NO: 11311 - DNA, 17 bp, Artificial Sequence
  Synthetic Polynucleotide
gctaagggcatctcgac

SEQ ID NO: 11312 - DNA, 18 bp, Artificial Sequence
  Synthetic Polynucleotide
acgccgccagagaatcga

SEQ ID NO: 11313 - DNA, 17 bp, Artificial Sequence
  Synthetic Polynucleotide
cctgcacgatcagctct

SEQ ID NO: 11314 - DNA, 17 bp, Artificial Sequence
  Synthetic Polynucleotide
aggttcagcaagggctt

SEQ ID NO: 11315 - DNA, 17 bp, Artificial Sequence
  Synthetic Polynucleotide
ctctgcccgcattcccg

SEQ ID NO: 11316 - DNA, 17 bp, Artificial Sequence
  Synthetic Polynucleotide
ctgaagcaattcaccct

SEQ ID NO: 11317 - DNA, 17 bp, Artificial Sequence
  Synthetic Polynucleotide
acctacgacgacaacac

SEQ ID NO: 11318 - DNA, 17 bp, Artificial Sequence
  Synthetic Polynucleotide
aagaccatgtccaatcg

SEQ ID NO: 11319 - DNA, 17 bp, Artificial Sequence
  Synthetic Polynucleotide
ggcacctatgacgacaa

SEQ ID NO: 11320 - DNA, 18 bp, Artificial Sequence
  Synthetic Polynucleotide
gctttccaggagccgaaa

SEQ ID NO: 11321 - DNA, 18 bp, Artificial Sequence
  Synthetic Polynucleotide
gctctcttccaagaccca

SEQ ID NO: 11322 - DNA, 17 bp, Artificial Sequence
  Synthetic Polynucleotide
ttccagttgccaaagat

SEQ ID NO: 11323 - DNA, 17 bp, Artificial Sequence
  Synthetic Polynucleotide
tcctttccgccatcgac

SEQ ID NO: 11324 - DNA, 18 bp, Artificial Sequence
  Synthetic Polynucleotide
ttagacggtagttgagga

SEQ ID NO: 11325 - DNA, 17 bp, Artificial Sequence
  Synthetic Polynucleotide
tcaccccatccacaaaa

SEQ ID NO: 11326 - DNA, 18 bp, Artificial Sequence
  Synthetic Polynucleotide
gcgagaagtacatgaggg

SEQ ID NO: 11327 - DNA, 17 bp, Artificial Sequence
  Synthetic Polynucleotide
ccccacccaatccacaa

SEQ ID NO: 11328 - DNA, 18 bp, Artificial Sequence
  Synthetic Polynucleotide
gaagttcgaggacgacgg

SEQ ID NO: 11329 - DNA, 17 bp, Artificial Sequence
  Synthetic Polynucleotide
gccaagtcccaacacaa

SEQ ID NO: 11330 - DNA, 17 bp, Artificial Sequence
  Synthetic Polynucleotide
ccccaagattccagctt

SEQ ID NO: 11331 - DNA, 18 bp, Artificial Sequence
  Synthetic Polynucleotide
gaaatcgttttcatgcac

SEQ ID NO: 11332 - DNA, 18 bp, Artificial Sequence
  Synthetic Polynucleotide
cttctactgagaaggagg

SEQ ID NO: 11333 - DNA, 18 bp, Artificial Sequence
  Synthetic Polynucleotide
ttccaacaatctcacact

SEQ ID NO: 11334 - DNA, 5 bp, Artificial Sequence
  Synthetic Polynucleotide
aaaaa

SEQ ID NO: 11335 - DNA, 21 bp, Artificial Sequence
  Synthetic Polynucleotide
acaggagcagatgatacagta

SEQ ID NO: 11336 - DNA, 20 bp, Artificial Sequence
  Synthetic Polynucleotide
tatggaaaacagatggcagg

SEQ ID NO: 11337 - DNA, 18 bp, Artificial Sequence
  Synthetic Polynucleotide
ctatggcaggaagaagcg

SEQ ID NO: 11338 - DNA, 16 bp, Artificial Sequence
  Synthetic Polynucleotide
tagcagtggcgcccga

SEQ ID NO: 11339 - DNA, 22 bp, Artificial Sequence
  Synthetic Polynucleotide
tctctctccttctagcctccgc

SEQ ID NO: 11340 - DNA, 5 bp, Artificial Sequence
  Synthetic Polynucleotide
aaatg

SEQ ID NO: 11341 - DNA, 5 bp, Artificial Sequence
  Synthetic Polynucleotide
caaga

SEQ ID NO: 11342 - DNA, 5 bp, Artificial Sequence
  Synthetic Polynucleotide
aatcc

SEQ ID NO: 11343 - DNA, 5 bp, Artificial Sequence
  Synthetic Polynucleotide
tcagg

SEQ ID NO: 11344 - DNA, 5 bp, Artificial Sequence
  Synthetic Polynucleotide
agacc

SEQ ID NO: 11345 - DNA, 5 bp, Artificial Sequence
  Synthetic Polynucleotide
cactt

SEQ ID NO: 11346 - DNA, 6 bp, Artificial Sequence
  Synthetic Polynucleotide
tccatg

SEQ ID NO: 11347 - DNA, 6 bp, Artificial Sequence
  Synthetic Polynucleotide
ccaaaa

SEQ ID NO: 11348 - DNA, 6 bp, Artificial Sequence
  Synthetic Polynucleotide
catgga

SEQ ID NO: 11349 - DNA, 6 bp, Artificial Sequence
  Synthetic Polynucleotide
caaagc

SEQ ID NO: 11350 - DNA, 6 bp, Artificial Sequence
  Synthetic Polynucleotide
cacttg

SEQ ID NO: 11351 - DNA, 5 bp, Artificial Sequence
  Synthetic Polynucleotide
ttctg

SEQ ID NO: 11352 - DNA, 5 bp, Artificial Sequence
  Synthetic Polynucleotide
tgtgg
